(19) United States
(12) Patent Application Publication
(10) Pub. No.: US 2023/0021583 A1
(43) Pub. Date: Jan. 26, 2023

(54) MEASLES-VECTORED COVID-19 IMMUNOGENIC COMPOSITIONS AND VACCINES

(71) Applicant: INSTITUT PASTEUR, PARIS (FR)

(72) Inventors: NICOLAS Robert, Xavier ESCRIOU, Paris (FR); FREDERIC TANGY, Paris (FR); CHRISTIANE GERKE, Paris (FR)

(21) Appl. No.: 17/797,570

(22) PCT Filed: Feb. 12, 2021
(86) PCT No.: PCT/EP2021/053540

§ 371 Date: Aug. 4, 2022

Related U.S. Application Data
(60) Provisional application No. 62/976,083, filed on Feb. 13, 2020.

(30) Foreign Application Priority Data
Feb. 13, 2020 (EP) 20305141.2
Jul. 8, 2020 (EP) 20305790.6

(51) Int. Cl. A61K 39/215; A61P 31/14; A61K 39/165; C12N 15/86

(52) U.S. Cl. CPC A61K 39/215; A61P 31/14; A61K 39/165; C12N 15/86; A61K 2039/5254

(57) ABSTRACT

The invention relates to the field of immunity against Coronaviruses. In this respect, the invention provides vectorized antigens derived from Coronaviruses that trigger an immune response against Coronaviruses. The invention accordingly relates to an active ingredient which is a live attenuated recombinant measles virus expressing Coronavirus antigen(s) and to its use in eliciting immunity, in particular protective immunity against SARS-CoV-2 strain and advantageously broad-spectrum protective immunity against various strains of Coronaviruses.

### FIELD OF THE INVENTION

[0001] The invention relates to the field of immunity against Coronaviruses.

### BACKGROUND

[0002] Coronaviruses are enveloped, positive-sense single-stranded RNA viruses with large genome (from 26 to 32 kb). Four genera (alpha, beta, gamma and delta) have been described and among them betacoronavirus has been subdivided in four lineages (A, B, C and D). Among the host identified for coronaviruses avian and mammalian specified, including humans have been especially shown to be infected either by strains circulating annually or by strains capable of giving rise to pandemic outbreaks. Human coronaviruses include annual strains HCoV-OC43, HCoV-229E, HCoV-HKU1, HCoV-NL63 and pandemic strains such as SARS-CoV (Severe Acute Respiratory Syndrome coronavirus) isolated in 2003 or MERS-CoV (Middle East Respiratory Syndrome coronavirus) isolated in 2012 and still circulating. SARS-CoV and MERS-CoV belong to the betacoronavirus lineage B and lineage C respectively. These coronaviruses are airborne transmitted and have been shown to have human-to-human transmission.

[0003] Beside these known strains, a new Coronavirus strain designated 2019-nCoV (or more recently designated severe acute respiratory syndrome coronavirus 2 (SARS-CoV-2) has been identified in 2019 as currently infecting people in China and that has spread around the world resulting in severe illness or death for a large number of the infected human hosts. This highly pathogenic stain emerged into the human population from animal reservoirs and has already proved to be responsible of high case-fatality rates including by human-to-human transmission causing great concerns for a coronavirus pandemic. On Jan. 30, 2020, the outbreak was declared a Public Health Emergency of International Concern by the World Health Organization (WHO) and then characterized as a pandemic on Mar. 11, 2020. The WHO also announced a name for this new coronavirus disease: COVID-19.

[0004] Almost 100 million people worldwide have been affected by the SARS-CoV-2 pandemic to date and more than 2 million have died of COVID-19. The pandemic has resulted in unprecedented global social and economic disruption, with a projected “optimistic loss” of $3.3 trillion and a worst-case scenario loss of $82 trillion worldwide (The GDP Risk; 2020). While the virus is now explosively expanding in a second wave in Europe and the northern hemisphere, no specific treatment has been shown to prevent or cure the disease. Together with enforcing public health measures, effective vaccines are needed for a return to pre-COVID-19 normalcy. There is therefore a need to propose vaccine candidates for inducing an immune response against SARS-CoV-2 and potentially providing protection against SARS-CoV-2 or possibly against a broader range of coronavirus strains, e.g., epidemic or pandemic strains.

[0005] This invention meets these and other needs.

### SUMMARY

[0006] The invention provides vectorized antigens derived from Coronaviruses that trigger an immune response against Coronaviruses. The invention accordingly relates to an active ingredient which is a live attenuated recombinant measles virus expressing Coronavirus antigen(s) and to its use in eliciting immunity, in particular protective immunity against 2019-nCoV (SARS-CoV-2) strain and advantageously broad-spectrum protective immunity against various strains of Coronaviruses. The invention also relates to polypeptides derived from the native antigens of SARS-CoV-2 wherein the polypeptides have useful properties to design efficient immunogens, in particular to design a vaccine candidate against coronavirus infection. The invention also relates to polynucleotides encoding the native antigens of SARS-CoV-2 or encoding polypeptides derived from the native antigens of SARS-CoV-2, in particular polynucleotides adapted for expression by a recombinant measles virus or for improved recovery from producing cells.

[0007] The invention is also directed to means for the preparation of recombinant measles virus expressing the polypeptides obtained from antigens of SARS-CoV-2 and to recombinant measles virus thus obtained.

[0008] The invention also concerns an immunogenic composition comprising recombinant measles virus expressing the polypeptides obtained from antigens of SARS-CoV-2. The invention also relates to the use of such immunogenic composition for eliciting a protective immune response in an animal host, in particular a mammalian host, especially a human host, against SARS-CoV-2 and optionally against other coronaviruses or against disease caused by the infection. The invention also relates to a method for the treatment of a host in need thereof, in particular for prophylactic treatment, against the infection by SARS-CoV-2 and optionally against other coronaviruses or against disease caused by the infection.

[0009] In particular, in a first aspect the invention provides a nucleic acid construct comprising: a cDNA molecule encoding a full length, antigenomic (+) RNA strand of an attenuated strain of measles virus (MV); and a first heterologous polynucleotide encoding: (a) a spike (S) protein of SARS-CoV-2 of SEQ ID NO: 3, or (b) an immunogenic fragment of the full-length S protein in (a) selected from the group consisting of the S1 polypeptide of SEQ ID NO: 11, the S2 polypeptide of SEQ ID NO: 13, the Secto polypeptide of SEQ ID NO: 7 and the tri-Secto polypeptide of SEQ ID NO: 16, or (c) a variant of (a) or (b) in which from 1 to 10 amino acids are modified by insertion, substitution, or deletion. In some embodiments the variant in (c) encodes a polypeptide comprising: (i) a mutation that maintains the expressed full length S protein in its prefusion conformation, and/or (ii) a mutation that inactivates the furin cleavage site of the S protein, and/or (iii) a mutation that inactivates the Endoplasmic Reticulum Retrieval Signal (EERS), and/or (iv) a mutation that maintains the receptor-binding domain (RBD) localized in the S1 domain of the S protein in the closed conformation, and wherein the first heterologous polynucleotide is positioned in an additional transcription unit (ATU) located between the P gene and the M gene of the MV (ATU2) or in an ATU located downstream of the H gene of the MV (ATU3). In some embodiments the mutation that maintains the expressed full length S protein in its prefusion conformation is a mutation by substitution of two proline residues at positions 986 and 987 (K986P and V987P) of the amino acid sequence of the S protein of SARS-CoV-2 of SEQ ID NO: 3, or a mutation by substitution of six proline residues at positions 817, 892, 899, 942, 986 and 987 (F817P, A892P, A899P, A942P, K986P and V987P) of the amino acid sequence of the S protein of SARS-CoV-2 of SEQ ID NO: 3, and/or the mutation that inactivates the furin cleavage site of the S protein is a mutation by substitution of three amino acid residues occurring in the S1/S2 furin cleavage site at positions 682, 683 and 685 (R682G, R683S and R685G) of the amino acid sequence of the S protein of SARS-CoV-2 of SEQ ID NO: 3, or a mutation by deletion of the loop encompassing the S1/S2 furin cleavage site between amino acid at position 675 and amino acid at position 685 of the S protein of SARS-CoV-2 of SEQ ID NO: 3, the loop consisting of the amino acid sequence QTQTNSPRRAR of SEQ ID NO: 50, and/or the mutation that inactivates the EERS is a mutation by substitution of two alanine residues at positions 1269 and 1271 of the amino acid sequence of SEQ ID NO: 3, and/or the mutation that maintains the RBD localized in the S1 domain of the S protein in the closed conformation is a mutation by substitution of two cysteine residues at positions 383 and 985 (S383C and D985C) of the amino acid sequence of the S protein of SARS-CoV-2 of SEQ ID NO: 3, or a mutation by substitution of two cysteine residues at positions 413 and 987 (G413C and P987C) of the amino acid sequence of the S protein of SARS-CoV-2 of SEQ ID NO: 3; and/or the variant in (c) encodes a polypeptide comprising a mutation selected from the group consisting of a deletion of the amino acid residues at positions 69 and 70 of the amino acid sequence of SEQ ID NO: 3, a deletion of the amino acid residues at positions 144 and 145 of the amino acid sequence of SEQ ID NO: 3, a mutation by substitution of the tyrosine residue at position 501 of the amino acid sequence of SEQ ID NO: 3 (N501Y), a mutation by substitution of the aspartic acid residue at position 570 of the amino acid sequence of SEQ ID NO: 3 (A570D), a mutation by substitution of the histidine residue at position 681 of the amino acid sequence of SEQ ID NO: 3 (P681H), a mutation by substitution of the isoleucine residue at position 716 of the amino acid sequence of SEQ ID NO: 3 (T7161), a mutation by substitution of the alanine residue at position 982 of the amino acid sequence of SEQ ID NO: 3 (S982A), a mutation by substitution of the histidine residue at position 1118 of the amino acid sequence of SEQ ID NO: 3 (D1118H), a mutation by substitution of the lysine residue at position 484 of the amino acid sequence of SEQ ID NO: 3 (E484K), a mutation by substitution of the asparagine residue at position 417 of the amino acid sequence of SEQ ID NO: 3 (K417N), a mutation by substitution of the threonine residue at position 417 of the amino acid sequence of SEQ ID NO: 3 (K417T) and a mutation by substitution of the glycine residue at position 614 of the amino acid sequence of SEQ ID NO: 3 (D614G).

[0010] In some embodiments of the first aspect the nucleic acid construct further comprises a second heterologous polynucleotide encoding at least one polypeptide of SARS-CoV-2 selected from the group consisting of: nucleocapsid (N) polypeptide or a variant thereof having at least 90% identity with the N polypeptide, matrix (M) polypeptide or a variant thereof having at least 90% identity with M polypeptide, E polypeptide or a variant thereof having at least 90% identity with E polypeptide, 8a polypeptide or a variant thereof having at least 90% identity with 8a polypeptide, 7a polypeptide or a variant thereof having at least 90% identity with 7a polypeptide, 3A polypeptide or a variant thereof having at least 90% identity with 3a polypeptide, and immunogenic fragments thereof; the second heterologous polynucleotide positioned within an additional transcription unit (ATU) at a location different from the ATU of the first heterologous polynucleotide.

[0011] In some embodiments of the first aspect the first heterologous polynucleotide encodes a polypeptide having an amino acid sequence selected from the group consisting of SEQ ID NOs: 5, 7, 9, 15, 17, 19, 43, 45, 47, 49, 52, 54, 56, 58, 60, 62 and 65.

[0012] In some embodiments of the first aspect the second heterologous polynucleotide encodes at least one of the N polypeptide of SEQ ID NO: 22, the M polypeptide of sequence SEQ ID NO: 24 or its endodomain, the E polypeptide of sequence SEQ ID NO: 23, the ORF8 polypeptide of SEQ ID NO: 25, the ORF7a polypeptide of SEQ ID NO: 27, and the ORF3a polypeptide of SEQ ID NO: 26.

[0013] In some embodiments of the first aspect the first heterologous polynucleotide has the open reading frame selected from the group consisting of:
[0014] i. SEQ ID NO: 1 or 2 or 36 which encodes the S polypeptide,
[0015] ii. SEQ ID NO: 10 which encodes the S1 polypeptide,
[0016] iii. SEQ ID NO: 12 which encodes the S2 polypeptide,
[0017] iv. SEQ ID NO: 4 which encodes the stab-S polypeptide (S2P),
[0018] v. SEQ ID NO: 6 which encodes the Secto polypeptide,
[0019] vi. SEQ ID NO: 8 which encodes the stab-Secto polypeptide,
[0020] vii. SEQ ID NO:14 which encodes the stab-S2 polypeptide,
[0021] viii. SEQ ID NO: 16 which encodes the tri-Secto polypeptide,
[0022] ix. SEQ ID NO: 18 which encodes the tristab-Secto polypeptide,
[0023] x. SEQ ID NO: 42 which encodes the S3F polypeptide,
[0024] xi. SEQ ID NO: 44 which encodes the S2P3F polypeptide,
[0025] xii. SEQ ID NO: 46 which encodes the S2PΔF polypeptide,
[0026] xiii. SEQ ID NO: 48 which encodes the S2PΔF2A polypeptide,
[0027] xiv. SEQ ID NO: 51 which encodes the T4-S2P3F polypeptide (tristab-Secto-3F),
[0028] xv. SEQ ID NO: 53 which encodes the S6P polypeptide,
[0029] xvi. SEQ ID NO: 55 which encodes the S6P3F polypeptide,
[0030] xvii. SEQ ID NO: 57 which encodes the S6PΔF polypeptide,
[0031] xviii. SEQ ID NO: 59 which encodes the SCCPP polypeptide,
[0032] xix. SEQ ID NO: 61 which encodes the SCC6P polypeptide,
[0033] xx. SEQ ID NO: 63 which encodes the S_{MVopt}2P polypeptide,
[0034] xxi. SEQ ID NO: 64 which encodes the S_{MVopt}ΔF polypeptide, and
[0035] xxii. SEQ ID NO: 66 which encodes the S_{MVopt}2PΔF polypeptide.

[0036] In some embodiments of the first aspect the nucleic acid construct is a cDNA construct comprising from 5′ to 3′ end the following polynucleotides coding for open reading frames:
[0037] (a) a polynucleotide encoding the N protein of the MV;
[0038] (b) a polynucleotide encoding the P protein of the MV;
[0039] (c) the first heterologous polynucleotide as defined in any one of claims 1-3, 4 and 6;
[0040] (d) a polynucleotide encoding the M protein of the MV;
[0041] (e) a polynucleotide encoding the F protein of the MV;
[0042] (f) a polynucleotide encoding the H protein of the MV;
[0043] (g) a polynucleotide encoding the L protein of the MV; and

[0044] wherein the polynucleotides are operatively linked within the nucleic acid construct and are under the control of a viral replication and transcriptional regulatory elements such as MV leader and trailer sequences and are framed by a T7 promoter and a T7 terminator and are framed by restriction sites suitable for cloning in a vector to provide a recombinant MV-CoV expression cassette.

[0045] In some embodiments of the first aspect the nucleic acid construct further comprises (a) a GGG motif followed by a hammerhead ribozyme sequence at the 5′-end of the nucleic acid construct, adjacent to a first nucleotide of the nucleotide sequence encoding a full-length antigenomic (+)RNA strand of an attenuated MV strain, in particular of a Schwarz strain or of a Moraten strain, and (b) a nucleotide sequence of a ribozyme, in particular the sequence of the Hepatitis delta virus ribozyme (6), at the 3′-end of the recombinant MV-CoV nucleic acid molecule, adjacent to the last nucleotide of the nucleotide sequence encoding the full length anti-genomic (+)RNA strand.

[0046] In some embodiments of the first aspect having the second heterologous polynucleotide, the second heterologous polynucleotide encodes the N polypeptide of SARS-CoV-2, and the second heterologous polynucleotide being cloned in an ATU at a different location with respect to the ATU used for cloning the first heterologous polynucleotide.

[0047] In some embodiments of the first aspect (i) the first heterologous polynucleotide comprises a sequence selected from the group consisting of SEQ ID NO: 36, SEQ ID NO: 63, SEQ ID NO: 64 and SEQ ID NO: 66, and is positioned within ATU2, or (ii) the first heterologous polynucleotide comprises a sequence selected from the group consisting of SEQ ID NO: 2, SEQ ID NO: 4, SEQ ID NO: 44, SEQ ID NO: 46, SEQ ID NO: 48, SEQ ID NO: 51, SEQ ID NO: 53, SEQ ID NO: 55, SEQ ID NO: 57, SEQ ID NO: 59 and SEQ ID NO: 61, and is positioned within ATU3.

[0048] In some embodiments of the first aspect (i) the first heterologous polynucleotide is positioned within ATU3 and the second heterologous polynucleotide, is positioned within ATU2, or (ii) the first heterologous polynucleotide is positioned within ATU2 and the second heterologous polynucleotide, is positioned within ATU3.

[0049] In some embodiments of the first aspect the measles virus is an attenuated virus strain selected from the group consisting of the Schwarz strain, the Zagreb strain, the AIK-C strain, the Moraten strain, the Philips strain, the Beckenham 4A strain, the Beckenham 16 strain, the CAM-70 strain, the TD 97 strain, the Leningrad-16 strain, the Shanghai 191 strain and the Belgrade strain.

[0050] In a second aspect the invention provides nucleic acid constructs comprising: (1) a cDNA molecule encoding a full length antigenomic (+) RNA strand of an attenuated strain of measles virus (MV); and (2) a first heterologous polynucleotide encoding a S protein or immunogenic fragment thereof of SARS-CoV-2 comprising an insertion, substitution, or deletion in the 11 amino acid residue sequence of the S protein aligned with positions 1263 to 1273 of the amino acid sequence of SEQ ID NO: 3, and wherein the insertion, substitution, or deletion increases cell surface expression of the S protein or immunogenic fragment thereof, wherein the first heterologous polynucleotide is positioned in an additional transcription unit (ATU) located between the P gene and the M gene of the MV (ATU2) or in an ATU located 3′ of the H gene of the MV (ATU3). In some embodiments the S protein or immunogenic fragment thereof comprises a substitution in the 11 amino acid residue sequence of the S protein aligned with positions 1263 to 1273 of the amino acid sequence of SEQ ID NO: 3. In some embodiments the S protein or immunogenic fragment thereof comprises a deletion of all or part of the 11 amino acid residue sequence of the S protein aligned with positions 1263 to 1273 of the amino acid sequence of SEQ ID NO: 3. In some embodiments the encoded S protein or immunogenic fragment thereof further comprises one or more additional substitutions that maintain the expressed S protein in its prefusion conformation. In some embodiments the encoded S protein or immunogenic fragment thereof further comprises the amino acid substitutions K986P and V987P at the amino acid positions corresponding to positions K986 and V987 of the amino acid sequence of SEQ ID NO: 3. In some embodiments the encoded S protein or immunogenic fragment thereof is a dual domain S protein. In some embodiments the first heterologous polynucleotide is positioned in ATU2. In some embodiments the first heterologous polynucleotide encodes: (a) a prefusion-stabilized SF-2P-dER polypeptide of SEQ ID NO: 76, or a variant thereof having at least 90% identity with SEQ ID NO: 76, wherein the variant does not vary at positions 986 and 987; or (b) a prefusion-stabilized SF-2P-2a polypeptide of SEQ ID NO: 82, or a variant thereof having at least 90% identity with SEQ ID NO: 82, wherein the variant does not vary at positions 986, 987, 1269, and 1271. In some embodiments the first heterologous polynucleotide encodes: (a) a prefusion-stabilized SF-2P-dER polypeptide of SEQ ID NO: 76; or (b) a prefusion-stabilized SF-2P-2a polypeptide of SEQ ID NO: 82. In some embodiments the first heterologous polynucleotide comprises SEQ ID NO: 75 which encodes the SF-2P-dER polypeptide, or SEQ ID NO: 81 which encodes the SF-2P-2a polypeptide. In some embodiments the first heterologous polynucleotide comprises SEQ ID NO: 75 which encodes the SF-2P-dER polypeptide.

[0051] In some embodiments of the second aspect the nucleic acid construct further comprises a second heterologous polynucleotide encoding at least one polypeptide of SARS-CoV-2 selected from the group consisting of: nucleocapsid (N) polypeptide or a variant thereof having at least 90% identity with the N polypeptide; matrix (M) polypeptide or a variant thereof having at least 90% identity with M polypeptide; E polypeptide or a variant thereof having at least 90% identity with E polypeptide; 8a polypeptide or a variant thereof having at least 90% identity with 8a polypeptide; 7a polypeptide or a variant thereof having at least 90% identity with 7a polypeptide; 3A polypeptide or a variant thereof having at least 90% identity with 3 polypeptide; and immunogenic fragments thereof, the second heterologous polynucleotide being positioned within an additional transcription unit (ATU) at a location different from the ATU of the first heterologous polynucleotide.

[0052] In some embodiments of the second aspect the nucleic acid construct further comprises a second heterologous polynucleotide encoding at least one polypeptide of SARS-CoV-2 selected from the group consisting of: nucleocapsid (N) polypeptide; matrix (M) polypeptide; E polypeptide; 8a polypeptide; 7a polypeptide; 3A polypeptide; and immunogenic fragments thereof, the second heterologous polynucleotide being positioned within an additional transcription unit (ATU) at a location different from the ATU of the first heterologous polynucleotide. In some embodiments the second heterologous polynucleotide encodes N polypeptide, the second heterologous polynucleotide being positioned within an additional transcription unit (ATU) at a location different from the ATU of the first heterologous polynucleotide.

[0053] In some embodiments of the second aspect the second heterologous polynucleotide encodes at least one of the N polypeptide of SEQ ID NO: 22, the M polypeptide of sequence SEQ ID NO: 24 or its endodomain, the E polypeptide of sequence SEQ ID NO: 23, the ORF8 polypeptide of SEQ ID NO: 25, the ORF7a polypeptide of SEQ ID NO: 27 and/or the ORF3a polypeptide of SEQ ID NO: 26, the second heterologous polynucleotide being positioned within an additional transcription unit (ATU) at a location different from the ATU of the first heterologous polynucleotide.

[0054] In some embodiments of the second aspect the second heterologous protein is within an ATU that is upstream of the N gene of the MV (ATU1), between the P and M genes of the MV (ATU2), or between the H and L genes of the MV (ATU3).

[0055] In some embodiments of the second aspect the nucleic acid construct further comprises from 5′ to 3′ the following polynucleotides coding for open reading frames:
[0056] (a) a polynucleotide encoding the N protein of the MV;
[0057] (b) a polynucleotide encoding the P protein of the MV;
[0058] (c) the first heterologous polynucleotide;
[0059] (d) a polynucleotide encoding the M protein of the MV;
[0060] (e) a polynucleotide encoding the F protein of the MV;
[0061] (f) a polynucleotide encoding the H protein of the MV;
[0062] (g) a polynucleotide encoding the L protein of the MV; and

[0063] wherein the polynucleotides are operatively linked within the nucleic acid construct, are under the control of MV leader and trailer sequences, are framed by a T7 promoter and a T7 terminator, and are framed by restriction sites suitable for cloning in a vector to provide a recombinant MV-CoV expression cassette.

[0064] In some embodiments of the second aspect the nucleic acid construct further comprises:
[0065] (a) a GGG motif followed by a hammerhead ribozyme sequence at the 5′-end of the nucleic acid construct, adjacent to the first nucleotide of a nucleotide sequence encoding a full-length antigenomic (+)RNA strand of an attenuated MV strain; and
[0066] (b) a nucleotide sequence of the Hepatitis delta virus ribozyme (6) at the 3′-end of the nucleic acid construct, adjacent to a last nucleotide of the nucleotide sequence encoding the full length anti-genomic (+)RNA strand of the attenuated MV strain.

[0067] In some embodiments of the second aspect the measles virus is an attenuated virus strain selected from the group consisting of the Schwarz strain, the Zagreb strain, the AIK-C strain, the Moraten strain, the Philips strain, the Beckenham 4A strain, the Beckenham 16 strain, the CAM-70 strain, the TD 97 strain, the Leningrad-16 strain, the Shanghai 191 strain, and the Belgrade strain. In some embodiments the nucleic acid construct further comprises the measles virus is the Schwarz strain.

[0068] The nucleic acid constructions of the first and second aspects of the invention may be incorporated into further aspects of the invention.

[0069] In a third aspect the invention provides transfer vectors for the rescue of a recombinant Measles virus (MV), comprising the nucleic acid construct of the invention. In some embodiments the transfer vector comprises a sequence encoding a polypeptide of SARS-CoV-2 that is selected from the group consisting of:
[0070] i. SEQ ID NO: 1 or 2 or 36 (construct S),
[0071] ii. SEQ ID NO: 4 (construct stab-S),
[0072] iii. SEQ ID NO: 6 (construct Secto),
[0073] iv. SED ID NO: 8 (construct stab-Secto),
[0074] v. SEQ ID NO: 10 (construct S1),
[0075] vi. SEQ ID NO: 12 (construct S2),
[0076] vii. SEQ ID NO: 14 (construct stab-S2),
[0077] viii. SEQ ID NO: 16 (construct tri-Secto),
[0078] ix. SEQ ID NO: 18 (construct tristab-Secto),
[0079] x. SEQ ID NO: 42 (construct S3F),
[0080] xi. SEQ ID NO: 44 (construct S2P3F),
[0081] xii. SEQ ID NO: 46 (construct S2PΔF),
[0082] xiii. SEQ ID NO: 48 (construct S2PΔF2A),
[0083] xiv. SEQ ID NO: 21 or 37 (construct N),
[0084] xv. SEQ ID NO: 51 (construct T4-S2P3F (tristab-Secto-3F)),
[0085] xvi. SEQ ID NO: 53 (construct S6P),
[0086] xvii. SEQ ID NO: 55 (construct S6P3F),
[0087] xviii. SEQ ID NO: 57 (construct S6PΔF),
[0088] xix. SEQ ID NO: 59 (construct SCCPP),
[0089] xx. SEQ ID NO: 61 (construct SCC6P),
[0090] xxi. SEQ ID NO: 63 (construct S_{MVopt}2P),
[0091] xxii. SEQ ID NO: 64 (construct S_{MVopt}ΔF), and
[0092] xxiii. SEQ ID NO: 66 (construct S_{MVopt}2PΔF).

[0093] In a fourth aspect the invention provides a plasmid vector comprising a nucleic acid construct of the invention, wherein the plasmid vector is SEQ ID NO: 29 (pTM2-MVSchw-gfp, also named pTM-MVSchw2-GFPbis or pTM-MVSchwarz-ATU2) or SEQ ID NO: 38 (pTM3-MVSchw-gfp, also named pTM-MVSchw3-GFP or pTM-MVSchwarz-ATU3).

[0094] In a fifth aspect the invention provides a recombinant measles virus comprising a nucleic acid construct of the invention. In some embodiments the recombinant measles virus is of the Schwarz strain. In some embodiments the recombinant measles virus comprises in its genome an expression cassette operatively linked thereto, the expression cassette comprising the nucleic acid construct according to the invention. In some embodiments the recombinant measles virus further expresses at least one polypeptide selected from N, M, E, ORF7a, ORF8 and ORF3a of the SARS-CoV-2 strain, or an immunogenic fragment thereof.

[0095] In a sixth aspect the invention provides immunogenic compositions and vaccines comprising a recombinant measles virus of the invention. In some embodiments the immunogenic composition or the vaccine is for use in inducing an immune response against SARS-CoV-2 virus in a subject. In some embodiments the immunogenic compositions and vaccines comprise (i) an effective dose of a recombinant measles virus of the invention, and (ii) a pharmaceutically acceptable vehicle, wherein the composition or the vaccine elicits a neutralizing humoral response and/or a cellular response against a polypeptide(s) of SARS-CoV-2 in an animal host after a single immunization. In some embodiments the immunogenic composition or vaccine is for use in eliciting a protective humoral immune response and/or a cellular immune response against SARS-CoV-2 in a host in need thereof.

[0096] In a seventh aspect the invention provides a process for rescuing recombinant measles virus of the invention. The process may comprise:
[0097] (a) co-transfecting helper cells stably expressing T7 RNA polymerase and measles virus N and P proteins with (i) a nucleic acid construct according to the invention or with a plasmid vector comprising the nucleic acid construct according to the invention, and (ii) a vector encoding the MV L polymerase;
[0098] (b) maintaining the transfected helper cells in conditions suitable for the production of recombinant measles virus;
[0099] (c) infecting cells enabling propagation of the recombinant measles virus by co-cultivating them with the transfected helper cells of step (b);
[0100] (d) harvesting recombinant measles virus.

[0101] In an eighth aspect the invention provides nucleic acid molecules comprising a polynucleotide selected from the group consisting of:
[0102] i. SEQ ID NO: 1 or 2 or 36 (construct S);
[0103] ii. SEQ ID NO: 4 (construct stab-S);
[0104] iii. SEQ ID NO: 6 (construct Secto);
[0105] iv. SED ID NO: 8 (construct stab-Secto);
[0106] v. SEQ ID NO: 10 (construct S1),
[0107] vi. SEQ ID NO: 12 (construct S2),
[0108] vii. SEQ ID NO: 14 (construct stab-S2),
[0109] viii. SEQ ID NO: 16 (construct tri-Secto),
[0110] ix. SEQ ID NO: 18 (construct tristab-Secto),
[0111] x. SEQ ID NO: 42 (construct S3F),
[0112] xi. SEQ ID NO: 44 (construct S2P3F),
[0113] xii. SEQ ID NO: 46 (construct S2PΔF),
[0114] xiii. SEQ ID NO: 48 (construct S2PΔF2A),
[0115] xiv. SEQ ID NO: 21 or 37 (construct N),
[0116] xv. SEQ ID NO: 51 (construct T4-S2P3F (tristab-Secto-3F)),
[0117] xvi. SEQ ID NO: 53 (construct S6P),
[0118] xvii. SEQ ID NO: 55 (construct S6P3F),
[0119] xviii. SEQ ID NO: 57 (construct S6PΔF),
[0120] xix. SEQ ID NO: 59 (construct SCCPP),
[0121] xx. SEQ ID NO: 61 (construct SCC6P),
[0122] xxi. SEQ ID NO: 63 (construct S_{MVopt}2P),
[0123] xxii. SEQ ID NO: 64 (construct S_{MVopt}ΔF),
[0124] xxiii. SEQ ID NO: 66 (construct S_{MVopt}2PΔF),
[0125] xxiv. SEQ ID NO: 75 (construct SF-2P-dER), and
[0126] xxv. SEQ ID NO: 81 (construct SF-2P-2a).

[0127] In a ninth aspect the invention provides polypeptides comprising an amino acid sequence selected from the group consisting of:
[0128] i. SEQ ID NO: 3 (construct S);
[0129] ii. SEQ ID NO: 5 (construct stab-S);
[0130] iii. SEQ ID NO: 7 (construct Secto);
[0131] iv. SED ID NO: 9 (construct stab-Secto);
[0132] v. SEQ ID NO: 11 (construct S1),
[0133] vi. SEQ ID NO: 13 (construct S2),
[0134] vii. SEQ ID NO: 15 (construct stab-S2),
[0135] viii. SEQ ID NO: 17 (construct tri-Secto),
[0136] ix. SEQ ID NO: 19 (construct tristab-Secto),
[0137] x. SEQ ID NO: 43 (construct S3F),
[0138] xi. SEQ ID NO: 45 (construct S2P3F),
[0139] xii. SEQ ID NO: 47 (construct S2PΔF),
[0140] xiii. SEQ ID NO: 49 (construct S2PΔF2A),
[0141] xiv. SEQ ID NO: 22 (construct N),
[0142] xv. SEQ ID NO: 52 (construct T4-S2P3F (tristab-Secto-3F)),
[0143] xvi. SEQ ID NO: 54 (construct S6P),
[0144] xvii. SEQ ID NO: 56 (construct S6P3F),
[0145] xviii. SEQ ID NO: 58 (construct S6PΔF),
[0146] xix. SEQ ID NO: 60 (construct SCCPP),
[0147] xx. SEQ ID NO: 62 (construct SCC6P),
[0148] xxi. SEQ ID NO: 65 (construct S_{MVopt}ΔF),
[0149] xxii. SEQ ID NO: 76 (construct SF-2P-dER), and
[0150] xxiii. SEQ ID NO: 82 (construct SF-2P-2a).

[0151] In a tenth aspect the invention provides recombinant proteins expressed by a transfer vector of the invention. The recombinant proteins may be expressed in vitro or in vivo. In some embodiments the recombinant proteins further comprise an amino acid tag for purification.

[0152] In an eleventh aspect the invention provides the in vitro use of an antigen having the sequence of any one of SEQ ID NOs: 3, 5, 7, 9, 11, 13, 15, 17, 19, 22, 23, 24, 25, 26, 27, 43, 45, 47, 49, 52, 54, 56, 58, 60, 62, 65, 76 and 82 for the detection of the presence of antibodies against the antigen in a biological sample previously obtained from an individual suspected of being infected by SARS-CoV-2, wherein the polypeptide is contacted with the biological sample to determine the presence of antibodies against the antigen.

[0153] In a twelfth aspect the invention provides a method comprising contacting a biological sample with a polypeptide comprising the amino acid sequence of any one of SEQ ID NOs: 3, 5, 7, 9, 11, 13, 15, 17, 19, 22, 23, 24, 25, 26, 27, 43, 45, 47, 49, 52, 54, 56, 58, 60, 62, 65, 76, and 82 or an immunogenic fragment thereof and detecting the formation of antibody-antigen complexes between antibodies present in the biological sample and the polypeptide. In some embodiments the biological sample is obtained from an individual suspected of being infected by SARS-CoV-2.

[0154] In a thirteenth aspect the invention provides methods for treating or preventing an infection by SARS-CoV-2 in a subject (for example a human host), comprising administering an immunogenic composition or vaccine according to the invention to the subject. Also provided are methods for inducing a protective immune response against SARS-CoV-2 in a subject (for example a human host), comprising administering an immunogenic composition or vaccine according to the invention to the subject. In some embodiments of the methods of treating or preventing an infection or inducing an immune response, the method comprises a first administration of the immunogenic composition or vaccine and a second administration of the immunogenic composition or vaccine. In some embodiments, the second administration is performed at from one to two months after the first administration.

### BRIEF DESCRIPTION OF THE FIGURES

[0155] FIG. 1: Restriction map of plasmid pKP-MVSchw (17858 bp).

[0156] FIG. 2: Schematic of the primary structure of the SARS-CoV-2 Spike protein and position of mutations. The spike protein consists of 2 subdomains, S1 and S2, separated by a furin cleavage site. In the S2 domain, the heptad repeat 1 (HR1), central helix (CH), connector domain (CD), heptad repeat 2 (HR2), transmembrane domain (TM), and cytoplasmic tail (CT) are shown. Positions of described mutations are indicated using arrows. Mutation (3F:R682G+R683S+R685G) or deletion (DetaF: 6756QTQTNSPRRAR-685) of the furin cleavage site to stabilize the full-length protein; Mutation (2P: K986P+V987P) locks the protein in the pre-fusion form; Mutation (K1269A+H1271A) of the endoplasmic reticulum retrieval signal to potentially enhance cell surface expression.

[0157] FIGS. 3A to 3C: Schematic representation of SARS-CoV-2 Spike Constructs of recombinant MV Vector. 3A. Simplified schematic of the S protein and positions of modifications. 3B/3C. Synthetic sequences of SARS-CoV-2 spike were cloned into the ATU3 (3B) or ATU2 (3C) position of the MV vector. All constructs in ATU3 are based on a fully human codon-optimized sequence of the full-length, membrane-bound S protein (SEQ ID NO: 2). All constructs in ATU2 are based on a measles-optimized sequence (MVopt, SEQ ID NO: 36). Modifications of the S protein in the different constructs are indicated and the names of the corresponding rescued viruses are shown. MV proteins are depicted as follows: N (nucleoprotein), P (phosphoprotein), M (matrix), F (fusion protein), H (hemagglutinin), L (large protein), T7 RNA polymerase promoter (T7), T7 RNA polymerase terminator (T7t), hammerhead ribozyme (hh), hepatitis delta virus ribozyme (hδh).

[0158] FIGS. 4A to 4B: Detection of SARS-CoV-2 S by Western Blot in cell lysates. Vero cells were infected at a MOI of 0.05 with A) MV-ATU3-S, or B) MV-AUT3-S2P, MV-ATU3-S2P3F, MV-ATU3-S2PΔF or MV-ATU3-S2PΔF2A, or the parental MV Schwarz strain (MVSchw) or were not infected (NI). Total cell extracts were prepared at 39 h post-infection, separated by electrophoresis on NuPAGE 4-12% Bis-Tris gel, transferred onto a PVDF membrane and detected with anti-SARS-CoV-1 spike polyclonal rabbit antibodies (Escriou et al., Virology, 2014), AlexaFluor 680-conjugated anti-rabbit antibodies and nearIR imaging. As loading control, the N protein of measles was detected using anti-MV nucleoprotein polyclonal rabbit antibodies (Covalab). The position of the SARS-CoV-2 spike protein, the S1 and S2 subdomains, and the measles N protein as well as molecular weight markers (in kDa) are shown.

[0159] FIGS. 5A and 5B: Comparative fusogenic properties of the various recombinant MVs. Vero cells were infected at a MOI of 0.05 with A) MV-ATU3-S, or B) MV-AUT3-S2P, MV-ATU3-S2P3F, MV-ATU3-S2PΔF or MV-ATU3-S2PΔF2A, or the parental MV Schwarz strain (MVSchw). Cell monolayers were observed at 39 h post-infection and areas of fused cells were marked.

[0160] FIGS. 6A and 6B: Antibody response to measles (A) and SARS-CoV-2 S (B) in IFNAR-KO mice after prime and boost immunization with recombinant MV expressing SARS-CoV-2 spike. Mice were immunized with the parental MV Schwarz strain (Schw), MV-ATU3-S(S), MV-AUT3-S2P (S2P), MV-ATU3-S2P3F (S2P3F), MV-ATU3-S2PΔF (S2PΔF) or MV-ATU3-S2PΔF2A (S2PΔF2A). Antibody responses were measured by measles-specific ELISA (A) and SARS-CoV-2 spike-specific ELISA (B) in sera collected following after prime (left parts of the graphs) or boost (right part of the graphs). Bars show medians. Detection limit (dotted line) in the anti-MV ELISA was 50 ELISA units. Detection limit for the anti-S ELISA was 200 ELISA units for sera collected after the boost and was 50 ELISA units in all other analyses. Representative results of two or more independent experiments are shown.

[0161] FIGS. 7A and 7B: SARS-CoV-2 microneutralization titers in IFNAR-KO mice after prime and boost immunization with recombinant MV expressing SARS-CoV-2 spike. A. Mice were immunized with the parental MV Schwarz strain (Schw), MV-ATU3-S(S), MV-AUT3-S2P (S2P), MV-ATU3-S2P3F (S2P3F), MV-ATU3-S2PΔF (S2PΔF) or MV-ATU3-S2PΔF2A (S2PΔF2A). Neutralization titers were measured by microneutralization assay following prime (left part of the graph) or prime/boost (right part of the graph) immunization(s) and were expressed as reciprocals of serum dilutions that resulted in the neutralization of 50% SARS-CoV-2 infectivity scored by cytopathic effect. Bars show medians. Detection limit was a titer of 20. Samples with undetectable neutralization activity were assigned a value of 10, equal to half the detection limit. Representative results of two or more independent experiments are shown. B. Assessment of the research reagents 20/118 (a panel comprising 4 convalescent human sera, 20/120, 122, 124, 126 and a control human serum, 128) and 20/130 provided by the National Institute of Biological Standards and Controls (NIBSC) in the microneutralization assay enabled comparison of results with other assays. The research reagents were measured four times on different days in the neutralization assay together with a pool of sera (S2PΔF-IS2 pool) obtained after the second immunization with MV-ATU3-S2PΔF. Two different stocks (C2 and C3.4) of the same SARS-CoV-2 strain were used. Back-titrated SARS-CoV-2 TCID50s used in the assay are shown. The results provided by NIBSC are listed for comparison, expressed as reciprocals of serum dilutions that resulted in inhibition of 50% of virus infectivity as scored by cytopathic effect (CPE) or plaque assay (PRNT50).

[0162] FIG. 8: MV and S-specific IFN-γ T cell in immunized mice after boost immunization. Mice were immunized twice at a 3-week interval with MV-ATU3-S2PΔF2A (S2PΔF2A) or parental MV Schwarz (MVSchw). Summed IFN-γ ELISpot responses (spot forming units, SPU) in splenocytes stimulated with peptide pools spanning the S protein (S1, S2), or a pool of two specific measles peptides are shown. Bars show medians.

[0163] FIGS. 9A to 9C: MV and S-specific CD4⁺ and CD8⁺ T cell responses in mice immunized with recombinant MV expressing SARS-CoV-2 spike. Mice were immunized with MV-ATU3-S(S), MV-AUT3-S2P (S2P), MV-ATU3-S2P3F (S2P3F), MV-ATU3-S2PΔF (S2PΔF), MV-ATU3-S2PΔF2A (S2PΔF2A) or parental MV Schwarz (Schw). The frequencies of splenic CD4⁺ T cells (A) or CD8⁺ T cells (B) producing Th1-characteristic cytokines IFN-γ and TNF-α or Th2-characteristic cytokines IL-5 and IL-13 in response to peptide pools spanning the S1 or S2 domain of the SARS-CoV-2 spike protein are shown cumulatively (summed responses to S1 and S2 pools). INF-γ/TNF-α or IL-5/IL-13 CD8⁺ T cells responses to MV (pool of two H-2b class I—restricted measles peptides) are shown in panel C.

[0164] FIGS. 10A to 10D: MV and S-specific double and single cytokine-positive CD4⁺ and CD8⁺ T cell responses in mice immunized with MV-ATU3-S2PΔF2A. Mice were immunized with MV-ATU3-S2PΔF2A (S2PΔF2A) or parental MV Schwarz (MVSchw). The frequencies of splenic CD4⁺ T cells (A) or CD8⁺ T cells (C) producing Th1-characteristic cytokines IFN-γ and TNF-α or Th2-characteristic cytokines IL-5 and IL-13 (double positive cells, respectively) in response to peptide pools spanning the S1 or S2 domain of the SARS-CoV-2 spike protein are shown cumulatively (summed responses to S1 and S2 pools). In addition, a pool of two H-2b class I—restricted measles peptides was used to assess T cell responses to the MV backbone. The frequency of single cytokine producing CD4⁺ T cells (B) or CD8⁺ T cells (D) in response to S peptide pools was not significantly different (ns) in mice immunized with MV-ATU3-S2PΔF2A or MVSchw control, except for TNF-α producing CD4⁺ T cells. Statistical analysis was performed using Mann-Whitney test (** p≤0.005, * p≤0.05).

[0165] FIGS. 11A to 11D: IgG1 and IgG2a response in IFNAR-KO mice after prime and boost immunization with recombinant MV expressing SARS-CoV-2. Mice were immunized with the parental MV Schwarz strain (Schw), MV-ATU3-S(S), MV-AUT3-S2P (S2P), MV-ATU3-S2P3F (S2P3F), MV-ATU3-S2PΔF (S2PΔF) or MV-ATU3-S2PΔF2A (S2PΔF2A). A. Isotype-specific (IgG1 and IgG2a) antibody responses against SARS-CoV-2 spike measured by ELISA. Bars show medians. Detection limit was 50 ELISA units. B/D. Ratios of IgG2a to IgG1 calculated for each construct/immunogen. C. Control experiments were performed by immunizing wt 129/Sv mice with alum-adjuvanted trimerized spike ectodomain expressed in HEK293 cells (T4S2P3F-8H).

[0166] FIGS. 12A to 12B: Protection of mice against challenge with SARS-CoV-2 after prime and boost (A) or after single (B) immunization. A. Mice were immunized twice at a 4-week interval with the parental MV Schwarz strain (Schw), MV-ATU3-S(S), MV-AUT3-S2P (S2P), MV-ATU3-S2PΔF (S2PΔF) or MV-ATU3-S2PΔF2A (S2PΔF2A). Blood samples were taken 20 days after the second immunization and respective neutralization titers determined (μNT). The mice were instilled Ad5:hACE2 25 days after boost immunization and were challenged with SARS-CoV-2 4 days later. B. Mice were immunized once with the parental MV Schwarz strain (Schw) or MV-ATU3-S2PΔF2A (S2PΔF2A). Blood samples were taken 165 days post-immunization and μNT titers determined. The mice were instilled with Ad5:hACE2 on day 173 and challenged 4 days later. In both experiments, lungs were harvested 4 days after challenge. Lung viral loads were determined for RNA levels in genome equivalents (GEQ) or infectious titers in plaque forming units (PFU) per lung. Statistical significance of the differences in microneutralization titers, GEQ, and infectious virus was assessed using the non-parametric Kruskal-Wallis test with Dunn's uncorrected post-hoc analysis (A) or Mann-Whitney test (B). * p<0.05, ** p<0.005, *** p<0.0005, **** p<0.0001. Analyses were performed using GraphPad Prism 8.

[0167] FIGS. 13A to 13B: Detection of SARS-CoV-2 S by Western Blot in cell lysates in ATU2 and ATU3 constructs. Vero cells were infected at MOI=1 with (A) the parental MV Schwarz strain (Schw), 4 different clones (1-4) of MV-ATU3-S(S), or 6 different clones (1-6) of MV-ATU2-S_{MVopt} (S_{MVopt}) and (B) the parental MV Schwarz strain (Schw), one representative clone of MV-ATU2-S_{MVopt} (S_{MVopt}), MV-ATU3-S2P (S2P), MV-ATU3-S2P3F (S2P3F), MV-ATU3-S2PΔF (S2PΔF) or 2 different clones (1, 2) of MV-ATU2-S_{MVopt}2P (S_{MVopt}2P), MV-ATU2-S_{MVopt}ΔF (S_{MVopt}ΔF), MV-ATU2-S_{MVopt}2PΔF (S_{MVopt}2PΔF). Protein cell extracts were prepared at 24 h post-infection, separated by electrophoresis on NuPAGE 4-12% Bis-Tris gel, transferred onto a PVDF membrane and probed with anti-SARS-CoV-2 spike polyclonal rabbit antibodies, AlexaFluor 680-conjugated anti-rabbit antibodies and nearIR imaging. As loading control, the N protein of measles was detected using anti-MV nucleoprotein polyclonal rabbit antibodies (Covalab). The position of the SARS-CoV-2 spike protein, the S1 and S2 subdomains, and the measles N protein as well as molecular weight markers (in kDa) are shown.

[0168] FIGS. 14A to 14C: Antibody response to measles (A) and SARS-CoV-2 S (B) and microneutralization titers (C) in IFNAR-KO mice after immunization with recombinant MV expressing SARS-CoV-2 spike in ATU2 or ATU3. Mice were immunized with the parental MV Schwarz strain (Schw), MV-ATU3-S(S), or MV-ATU2-S_{MVopt} (S_{MVopt}). Antibody responses in sera collected after prime or boost were measured by measles-specific ELISA (A) and SARS-CoV-2 spike-specific ELISA (B), neutralizing antibodies were measured by microneutralization assay (C). Bars show medians. Lower limits of quantification nare indicated by dotted lines.

[0169] FIG. 15: In vitro and in vivo evaluation of recombinant MV Schwarz expressing 6P-stabilized SARS-CoV-2 spike.

Vero cells were infected at a MOI of 1 with MV-ATU3-S, MV-ATU3-S2P, MV-ATU3-S2PΔF or MV-AUT3-S6P (2 viral clones), or the parental MV Schwarz strain (MVSchw) or were not infected (NI). Total cell extracts were prepared at 24 h post-infection, separated by electrophoresis on NuPAGE 4-12% Bis-Tris gel, transferred onto a PVDF membrane and detected with anti-SARS-CoV-2 spike polyclonal rabbit antibodies, AlexaFluor 680-conjugated anti-rabbit antibodies and nearIR imaging (A, upper panel). As loading control, the MV N protein was probed using anti-MV nucleoprotein polyclonal rabbit antibodies (Covalab) (A, lower panel). The position of the SARS-CoV-2 spike protein, the S1 and S2 subdomains, and the measles N protein as well as molecular weight markers (in kDa) are shown.
IFNAR-KO mice were immunized twice at a 4-week interval with the parental MV Schwarz strain (Schw), MV-ATU3-S2P (S2P), MV-AUT3-S2PΔF (S2PΔF) or MV-ATU3-S6P (S6P). Antibody responses were measured in sera collected 3 weeks after prime or boost by measles-specific ELISA (B), SARS-CoV-2 spike-specific ELISA (C) and SARS-CoV-2 microneutralization assay (μNT, D). The mice were instilled with Ad5::hACE2 24 days after boost immunization and challenged 4 days later. Lungs were harvested 4 days after challenge. Lung viral loads were determined as RNA levels (GEQ) per lung (E). Bars show medians. Lower limits of quantification are indicated by dotted lines. Statistical significance of the differences in GEQ titers was assessed using the Kruskal-Wallis test with Dunn's uncorrected post-hoc analysis. ** p<0.005, *** p<0.0005. Analyses were performed using GraphPad Prism 8.

[0170] FIG. 16: Comparative analysis of the fusion properties of S and the various mutated S proteins encoded by recombinant MVs. HEK-293T-GFP10 cells were transfected with plasmids allowing transient expression of S (wt-S), S2P (S-2P), S3F (S-3F), S2P3F (S-2P&3F), or S2PΔF (S-2P&ΔF) and co-cultured with HEK-293T-GFP11 cells transfected with hACE2 expression plasmid, allowing reconstitution of GFP activity if fusion occurs between the two cell subpopulations, according to the assay described for S in Buchrieser et al (2020). Negative (neg, mock-transfected) and positive (pos, transfected with a plasmid expressing S at high levels) controls were included. Images of the cell sheets were recorded at 18 h post-transfection. Percentages of fusion were scored as GFP areas per cell area and plotted in the graph below images.

[0171] FIG. 17: Protection of mice against challenge with SARS-CoV-2 after prime only immunization. Mice were immunized once with the parental MV Schwarz strain (Schw), MV-ATU3-S2P (S2P) or MV-ATU3-S2PΔF2A (S2PΔF2A). Blood samples were taken 3 weeks post-immunization and antibody responses were measured by measles-specific ELISA (A), SARS-CoV-2 spike-specific ELISA (B) and SARS-CoV-2 microneutralization assay (μNT, C). The mice were instilled with Ad5:hACE24 weeks post-immunization and challenged 4 days later. Lungs were harvested 4 days after challenge. Lung viral loads were determined as RNA levels (GEQ) or infectious titers (PFU) per lung. Bars show medians. Lower limits of quantification are indicated by dotted lines. Statistical significance of the differences in microneutralization titers, GEQ, and infectious virus was assessed using the Kruskal-Wallis test with Dunn's uncorrected post-hoc analysis. * p<0.05, ** p<0.005, *** p<0.0005. Analyses were performed using GraphPad Prism 8.

[0172] FIG. 18: Optimization of SARS-CoV-2 spike ectodomain constructs for efficient secretion and assembly into homotrimers. (A). Schematic of a secreted and trimerized form of the spike (tri-Secto) corresponding to the full-length ectodomain of S fused at its C-terminus to a foldon (T4 or GCN4) through a Ser-Gly-Gly connecting linker followed by the Twin-strep-tag (Strep Tag). The positions of the signal peptide, subdomains S1 and S2, furin cleavage site, fusion peptide, heptad repeats (HR) 1 and 2, and connector domain (CD) are indicated. Positions of mutations described in the text are indicated using arrows underneath the schematic. The constructs were named according to the combination of mutations and foldon: as an example, T4-S2P3F combined the 2P and 3F mutations with the T4 fibritin foldon. Mutation (3F:R682G+R683S+R685G) or deletion (DetaF: 6756QTQTNSPRRAR-685) of the furin cleavage site to stabilize the full-length protein; Mutation (2P: K986P+V987P) locks the protein in the pre-fusion form; Trimerisation foldon:T4 or GCN4 (B). HEK 293T cells were transiently transfected with the indicated pCI-Spike_ectomain plasmid DNAs (right part of the panel, foldon T4 or GCN4 for secreted ectodomains is indicated), or, as controls, with pCI-S2P, pCI-S2PΔF and pCI-S3F plasmid DNAs, which encode full-length variants of spike (left part of the panel, full-length membrane-anchored (mb) spike). Supernatants were collected at 48 h post-transfection, separated by electrophoresis on NuPAGE 4-12% Bis-Tris gel, transferred onto a PVDF membrane and detected with anti-SARS-CoV-2 spike polyclonal rabbit antibodies, AlexaFluor 680-conjugated anti-rabbit antibodies and nearIR imaging. The position of molecular weight markers (in kDa) are shown. (C). The T4-S2P3F, GCN4-S2P3F and T4-S2P polypeptides were separated by size exclusion chromatography on a Superdex200 column. The elution profiles were recorded by absorbance at 280 nm (mAU).

[0173] FIG. 19: Detection of SARS-CoV-2 spike ectodomain in supernatants of MV-ATU3-T4-S2P3F infected cells. Vero cells were infected at a MOI of 0.05 with MV-ATU3-S2P3F, MV-ATU3-Secto, MV-ATU3-T4-S2P3F (4 viral clones), or the parental MV Schwarz strain (MVSchw) or were not infected (NI). Supernatants (upper panel) were collected and total cell extracts (middle panel) were prepared at 39 h post-infection, separated by electrophoresis on NuPAGE 4-12% Bis-Tris gel, transferred onto a PVDF membrane and detected with anti-SARS-CoV-2 spike polyclonal rabbit antibodies, AlexaFluor 680-conjugated anti-rabbit antibodies and nearIR imaging. As loading control for total cell extracts, the MV N protein was probed using anti-MV nucleoprotein polyclonal rabbit antibodies (Covalab) (lower panel). The position of the SARS-CoV-2 spike protein/ectodomain, the S1 and S2 subdomains, and the measles N protein as well as molecular weight markers (in kDa) are shown.

[0174] FIG. 20: Expression levels of SARS-CoV-2 N in lysates from cells infected with ATU2-N and ATU2-N_{MVopt} viruses. Vero cells were infected at a MOI of 1 with MV-ATU2-N (4 viral clones), MV-ATU2-N_{MVopt} (4 viral clones), or the parental MV Schwarz strain (MVSchw) or were not infected (NI). Total cell extracts were prepared at 24 h post-infection, separated by electrophoresis on NuPAGE 4-12% Bis-Tris gel, transferred onto a PVDF membrane and detected with anti-SARS-CoV-2 nucleoprotein polyclonal rabbit antibodies, AlexaFluor 680-conjugated anti-rabbit antibodies and nearIR imaging (upper panel). As loading control, the MV N protein was probed using anti-MV nucleoprotein polyclonal rabbit antibodies (Covalab) (lower panel). The position of the SARS-CoV-2 nucleoprotein, and the measles N protein as well as molecular weight markers (in kDa) are shown.

[0175] FIG. 21. Schematic of the native S protein of SARS-CoV-2. The native S protein is 1273 amino acids (aa) in length. The protein contains 2 subunits, S1 and S2, generated by cleavage at the furin cleavage site (F). S1 contains the signal peptide (SP), N-terminal domain (NTD) and receptor-binding domain (RBD). S2 contains the fusion peptide (FP), heptad repeats 1 (HR1) and 2 (HR2), transmembrane domain (TM), and cytoplasmic tail (CT). The 2P indicates the two mutated prolines, K986P and V987P. The letters KLHYT indicate the endoplasmic reticulum retrieval signal (ERRS) motif KxHxx of SEQ ID NO: 149, in the CT. dER indicates constructs carrying a deletion of the 11 C-terminal amino acids from the CT.

[0176] FIGS. 22A to 22D. Schematic of S gene constructs and characterization of S-expressing rMVs. a The native S gene of SARS-CoV-2 with notable domains is indicated relative to the S gene constructs cloned into the MV vector. 2P and dER modifications are also indicated. All S constructs were cloned into either the second (ATU2) or third (ATU3) additional transcription units of pTM-MVSchwarz (MV Schwarz), the MV vector plasmid. The MV genome comprises the nucleoprotein (N), phosphoprotein (P), V and C accessory proteins, matrix (M), fusion (F), hemagglutinin (H) and polymerase (L) genes. Plasmid elements include the T7 RNA polymerase promoter (T7), hammerhead ribozyme (hh), hepatitis delta virus ribozyme (8), and T7 RNA polymerase terminator (T7t). b Growth kinetics of rMV constructs used to infect Vero cells at an MOI of 0.1. Cell-associated virus titers are indicated in TCID₅₀/ml. c Western blot analysis of SARS-CoV-2 S protein in cell lysates of Vero cells infected with the rMVs expressing Sf-dER or S2-dER from either ATU2 or ATU3, with or without the 2P mutation. d Immunofluorescence staining of Vero cells infected with the indicated rMVs 24 h after infection. Permeabilized or non-permeabilized cells were stained for S, MV N and nuclei.

[0177] FIGS. 23A to 23F. Induction of humoral responses by prime-boost vaccination. a Homologous prime-boost of IFNAR −/− mice (n=6 or n=4 for the empty MV control) immunized Intraperitoneally with 1×10⁵ TCID₅₀ of the indicated rMV at days 0 and 28. Sera were collected 28 and 42 days after immunization and assessed for specific antibody responses to b MV antigens or c S-SARS-CoV-2 S. The data show the reciprocal endpoint dilution titers with each data point representing an individual animal. d Neutralizing antibody responses to SARS-CoV-2 virus expressed as 50% plaque reduction neutralization test (PRNT₅₀) titers. e IgG subclass of S-specific antibody responses in mice 4 weeks after the first immunization. f Ratio of IgG2a/IgG1 or Th1/Th2 responses. Data are represented as geometric mean with line and error bars indicating geometric SD. Statistical significance was determined by a two-way ANOVA adjusted for multiple comparisons. Asterisks (*) indicate significant mean differences (** p<0.01, and **** p<0.001) as determined by the Mann-Whitney U-test.

[0178] FIGS. 24A to 24D. Induction of S-specific cellular responses by rMV vaccination. a Immunization of IFNAR −/− mice (n=12 or n=3 for the empty MV control) immunized intraperitoneally with 1×10⁵ TCID₅₀ of the indicated rMVs. Seven days after immunization, ELISPOT for IFNγ was performed on freshly extracted splenocytes. The data are shown as IFNγ-secreting cells or spot-forming cells (SFC) per 1×10⁶ splenocytes detected after stimulating with b MV Schwarz or c SARS-CoV-2 S peptide pools specific to CD8⁺ or CD4⁺ T cells. d Ratio of IFNγ-secreting cells stimulated by CD4⁺ or CD8⁺ peptides to those stimulated by MV Schwarz. Each data point represents an individual mouse. Asterisks (*) indicate significant mean differences (* p<0.05; ** p<0.01, and **** p<0.001) as determined by the Mann-Whitney U-test.

[0179] FIGS. 25A and 25B. Cytokine expression profile of T cells. IFNAR −/− mice (n=12 or n=3 for the empty MV control) immunized intraperitoneally (i.p.) with 1×10⁵ TCID₅₀ of the indicated rMVs and splenocytes were stimulated with S-specific peptide pools. S-specific a CD8⁺ and b CD4⁺ T-cells were stained for intracellular IFNγ, TNFα and IL-5. Asterisks (*) indicate significant mean differences (* p<0.05; ** p<0.01, and **** p<0.001) as determined by the Mann-Whitney U-test.

[0180] FIGS. 26A to 26F. Persistence of neutralizing antibodies and immune protection. a Immunization and challenge schedule for IFNAR −/− mice (n=6). Animals were immunized interperitoneally by homologous prime-boost at days 0 and 28. Sera were collected at days 52, 72, and 110. Animals were challenged on day 110 by intranasal inoculation of mouse-adapted SARS-CoV-2 virus (MACo3) at 1.5×10⁵ PFU. Sera were assessed for levels of specific antibodies against b MV and c SARS-CoV-2 S. d Neutralizing antibody responses against SARS-CoV-2 virus, expressed as 50% plaque reduction neutralization test (PRNT₅₀) titers. e SARS-CoV-2 viral RNA copies detected by RT-qPCR in homogenized lungs of challenged animals, calculated as copies/lung. f Titer of infectious viral particles recovered from the homogenized lung of the immunized animals expressed as PFU/lung. Data are represented as geometric means with line and error bars indicating geometric SD. Statistical significance was determined by a two-way ANOVA adjusted for multiple comparisons. Asterisks (*) indicate significant mean differences (* p<0.05; ** p<0.01, and **** p<0.001).

[0181] FIGS. 27A to 27G. Immune responses and protection after a single immunization. a Immunization and challenge schedule for IFNAR^{-/-} mice (n=6). Animals were immunized interperitoneally on day 0. Sera were collected at days 24 and 48. Animals were challenged on day 48 by intranasal inoculation of mouse-adapted SARS-CoV-2 virus (MACo3) at 1.5×10⁵ PFU. Sera were assessed For levels of specific antibodies to b MV and c S-SARS-CoV-2 protein. d Neutralizing antibody responses against SARS-CoV-2 virus, expressed as 50% plaque reduction neutralization test (PRNT₅₀) titers. e SARS-CoV-2 viral RNA copies detected by RT-qPCR in homogenized lungs of challenged animals, calculated as copies/lung. f Titer of infectious viral particles recovered from the homogenized lung of the immunized animals expressed as PFU/lung. Data are represented as geometric means with line and error bars indicating geometric SD. Statistical significance for antibody responses (top panels) was determined by two-way ANOVA adjusted for multiple comparisons. The rest of the data (bottom panels) was analyzed by the Mann-Whitney U-test. Asterisks (*) indicate significant mean differences (* p<0.05; ** p<0.01, and **** p<0.001).

[0182] FIG. 28. Expression of SARS-CoV-2 S antigens on the surface of transfected HEK293T cells. Cells transfected with pcDNA expression vectors encoding full-length S or S2 subunit antigens were stained for indirect immunofluorescence with an anti-S antibody followed by Alexa Fluor 488-conjugated goat anti-rabbit IgG. Propidium iodide was used to exclude dead cells by gating (upper dot plots). Histograms show surface expression of full-length S (left histograms) or S2 subunit proteins (right histograms). Native-conformation S antigens (light grey), prefusion-stabilized S (dark grey), mock-transfected control cells (black histograms) and corresponding mean fluorescence intensities (MFI) are shown.

[0183] FIG. 29. S protein-mediated syncytium formation in transfected Vero cells. Images of Vero cells transfected with pcDNA expression vectors encoding SARS-CoV-2 S proteins were acquired 24 hours post-transfection. Upper images show Vero cells transfected with plasmids encoding native-conformation S antigens, while lower images depict cells transfected with prefusion-stabilized S antigens and non-transfected control Vero cells. Grey lines delineate the borders of syncytia. Native SF indicates native-conformation full-length S protein with an intact CT.

[0184] FIG. 30. Immunofluorescence analysis of intracellular S protein expression in Vero cells infected with recombinant MV vaccines. Vero cells were infected with rMVs expressing SARS-CoV-2 S proteins or empty MV Schwarz. Twenty-four hours after infection, S protein was detected in saponin-permeabilized cells using a rabbit anti-S antibody followed by Cy3-conjugated goat anti-rabbit IgG. MV N protein was visualized using mouse monoclonal anti-N antibody followed by Alexa Fluor 488-conjugated goat anti-mouse IgG. Nuclei were stained with DAPI. Images were acquired using a fluorescence microscope.

[0185] FIG. 31. Immunofluorescence analysis of S protein surface expression in Vero cells infected with recombinant MV vaccines. Vero cells were infected with rMVs expressing SARS-CoV-2 S proteins or empty MV Schwarz. Twenty-four hours after infection, S protein was detected on the surface of the non-permeabilized cells using a rabbit anti-S antibody followed by Cy3-conjugated goat anti-rabbit IgG. MV N protein was visualized using a mouse monoclonal anti-N antibody followed by Alexa Fluor 488-conjugated goat anti-mouse IgG. Nuclei were stained with DAPI. Images were acquired using a fluorescence microscope.

[0186] FIG. 32. Western blot analysis of S protein expression in Vero cells infected with recombinant MV vaccines from serial passages. MV ATU2 vaccines expressing SF-dER or SF-2P-dER antigens were serially passaged on Vero cells from P1 up to P10 and S protein expression was determined by immunoblotting of P1, P5, and P10 cell lysates. Vero cells infected with empty MV were examined in parallel and served as negative controls.

[0187] FIGS. 33A to 33C. Cytokine expression profile of T cells assessed in IFNAR^{-/-} mice (n=5 or n=3 for a control Empty MV group) immunized intraperitoneally (i.p.) with 1×10⁵ TCID₅₀ of MV-ATU2-SF-2P-dER or Empty MV. Splenocytes were stimulated with either S-specific CD4 or CD8 peptide (Table 6A and 6B). S-specific a CD8⁺ and b CD4⁺ T-cells were stained for intracellular IFNγ, TNFα, IL-5 and IL13. c S-specific CD4⁺ memory T cells were stained for intracellular IL-5 and IL13. Asterisks (*) indicate significant mean differences (* p<0.05) as determined by Kruskal-Wallis ANOVA with multiple comparisons tests.

[0188] FIGS. 34A to 34C. Dose-dependent homologous prime-boost immunization. IFNAR^{-/-} mice (n=6 or n=4 for the empty MV control) were immunized intraperitoneally with the indicated rmV vaccine candidates at 1×10⁵ TCID₅₀ or 1×10⁴ TCID₅₀ at days 0 and 28. Sera were collected 28 and 50 days after immunization and assessed for specific antibody responses to a MV antigen or b SARS-CoV-2 S protein. The data show the reciprocal endpoint dilution titers with each data point represents an individual animal. c Neutralizing antibody response to SARS-CoV-2 virus expressed as 50% plaque reduction neutralization test (PRNT₅₀) titers. Data are represented as geometric means with lines and error bars indicating geometric SD. Statistical significance was determined by a two-way ANOVA adjusted for multiple comparisons. Asterisks (*) indicate significant mean differences (*p<0.05, **p<0.01, and **** p<0.001).

[0189] FIG. 35. FACS analysis of transfected HEK293T cells with pCDNA expressing S protein of SARS-CoV-2. Cells transfected with pcDNA expression vectors encoding full-length S or S2 subunit antigens were stained for indirect immunofluorescence with an anti-S antibody followed by Alexa Fluor 488-conjugated goat anti-rabbit IgG. Propidium iodide was used to exclude dead cells by gating (upper dot plots). Histograms show surface expression of full-length S (left histograms) or S2 subunit proteins (right histograms). Native-conformation S antigens (light grey), prefusion-stabilized S (dark grey), mock-transfected control cells (black histograms) and corresponding mean fluorescence intensities (MFI) are shown.

### DETAILED DESCRIPTION

### Definitions

[0190] As used herein, the articles “a” and “an” refer to one or to more than one (i.e., to at least one) of the grammatical object of the article. By way of example, “an element” means one element or more than one element. Furthermore, use of the term “including” as well as other forms, such as “include,” “includes,” and “included,” is not limiting.

[0191] As used herein, the term “about” in quantitative terms refers to plus or minus 10% of the value it modifies (rounded up to the nearest whole number if the value is not sub-dividable, such as a number of molecules or nucleotides).

[0192] All ranges disclosed herein are inclusive of the recited endpoint and independently combinable (for example, the range of “from 50 mg to 500 mg” is inclusive of the endpoints, 50 mg and 500 mg, and all the intermediate values).

[0193] As used herein, the term “comprising” may include the embodiments “consisting of” and “consisting essentially of.” The terms “comprise(s),” “include(s),” “having,” “has,” “contain(s),” and variants thereof, as used herein, are intended to be open-ended transitional phrases, terms, or words that require the presence of the named ingredients/steps and permit the presence of other ingredients/steps. However, such description should be construed as encompassing within its scope compositions or processes as “consisting of” and “consisting essentially of” the enumerated components, which allows the presence of only the named components or compounds, along with any acceptable carriers or fluids, and excludes other components or compounds.

[0194] The terms “upstream” and “downstream” are used herein to refer to the relative position of a nucleic acid sequence within a longer nucleic acid sequence that is relative to the direction of RNA transcription (5′ to 3′) of the longer nucleic acid sequence. The term “upstream” refers to a nucleic acid sequence as being nearer to the 5′ end of a longer nucleic acid sequence (earlier in RNA transcription). The term “downstream” refers to a nucleic acid sequence as being nearer to the 3′ end of a longer nucleic acid sequence (later in RNA transcription).

[0195] As used herein, the term “antigenic polypeptide” refers to a polypeptide which is capable of inducing an immune response to the virus from which the polypeptide is derived.

[0196] As used herein, the term “immunogenic fragment” of a polypeptide refers to a polypeptide fragment which is capable of inducing an immune response to the virus from which the polypeptide is derived. Non-limiting examples of immunogenic fragments include: Secto polypeptide of SARS-CoV-2, stab-Secto polypeptide of SARS-CoV-2, S1 polypeptide of SARS-CoV-2, S2 polypeptide of SARS-CoV-2, tri-Secto polypeptide of SARS-CoV-2, tristab-Secto polypeptide of SARS-CoV-2, and S mutated in the domain involved in endoplasmic reticulum retention.

[0197] For the purpose of the present invention virus strain SARS-CoV-2 will be described in particular by reference to its nucleotide sequence (wild type sequence) disclosed in Genbank as MN908947 sequence and publicly available from NBCBI since 20 Jan. 2020 and that has been updated since that date as MN908947.3.

[0198] Throughout the text, figures and sequence listing, the expressions “coronavirus 2019-nCoV”, “2019-nCoV”, “nCoV” or “SARS-CoV-2” are interchangeable.

[0199] The expression “polypeptide” or “polypeptide of a coronavirus in particular of SARS-CoV-2” defines a molecule resulting from a concatenation of amino acid residues.

[0200] As used herein, “increased cell surface expression” of an S-protein or dual domain S-protein having a mutation by insertion, substitution, or deletion in the cytoplasmic tail is measured by transfecting human embryonic kidney cells (HEK) 293T (ATCC CRL-3216) with an expression construct to express the mutated protein in parallel to control HEK 293T cells transfected with a corresponding non-mutated protein and measuring cell-surface expression using an immune-assay. The cell surface expression can be further increased by an additional mutation by insertion, substitution, or deletion, for example an additional mutation that maintains the S protein in the pre-fusion form such as the 2P mutation. An exemplary assay is described in the Examples and certain results from the assay are presented in FIG. 28 and FIG. 35.

[0201] As defined herein, the expression “dER” refers to a mutation by deletion of the 11 C-terminal amino acid residues (aa 1263-1273) from the cytoplasmic tail of the S protein, especially of the S protein of SARS-CoV-2 of SEQ ID NO: 3. The deletion of the domain from the cytoplasmic tail increases surface expression of the polypeptide fragment of S in the cells infected with the recombinant MV expressing this polypeptide fragment.

[0202] As defined herein, the term “2P” refers to a mutation of 2 amino acid residues, i.e. mutation by substitution of two proline residues at positions 986 and 987 (K986P+V987P) of the amino acid sequence of the S protein of SARS-CoV-2 of SEQ ID NO: 3, that maintains the S protein in the pre-fusion form, the mutation occurring in the S2 domain, e.g. between the heptad repeat 1 (HR1) and the central helix (CH).

[0203] As defined herein, the term “2A” or “2a” refers to a mutation of two amino acid residues (K1269A+H1271A) of the endoplasmic reticulum retrieval signal in the amino acid sequence of the S protein of SARS-CoV-2 of SEQ ID NO: 3 to potentially increase cell surface expression.

[0204] As used herein, the phrase “dual domain S protein” refers to a coronavirus spike (S) protein that includes both the S1 and S2 domains. A dual domain S protein may include mutations (substitutions, deletions, and/or additions), but is not missing an entire S1 or S2 domain.

[0205] As used herein, the expression “encoding” defines the ability of the nucleic acid molecules to be transcribed and where appropriate translated for product expression into selected cells or cell lines. Accordingly, the nucleic acid construct may comprise regulatory elements controlling the transcription of the coding sequences, in particular promoters and termination sequences for the transcription and possibly enhancer and other cis-acting elements. These regulatory elements may be heterologous with respect to the CoV, in particular the SARS-CoV-2 polynucleotide sequences.

[0206] The expression “operatively linked” or “operably linked” refers to the functional link existing between the different polynucleotides of the nucleic acid construct of the invention such that the different polynucleotides and nucleic acid construct are efficiently transcribed and if appropriate translated, in particular in cells or cell lines, especially in cells or cell lines used as part of a rescue system for the production or amplification of recombinant infectious MV particles of the invention or in host cells, especially in mammalian or in human cells.

[0207] As used herein the term “replicon” refers to any genetic element (e.g., plasmid, chromosome, viral RNA) that functions as an autonomous unit of DNA or RNA replication (i.e. self-replicating). A replicon may originate from a viral genome, and may contain viral nonstructural genes for viral genome replication with one or more structural proteins deleted or replaced by genes foreign to the wild type viral genome.

[0208] As used herein, the term “recombining” means introducing at least one polynucleotide into a cell, for example under the form of a vector, the polynucleotide integrating (entirely or partially) or not integrating into the cell genome (such as defined above).

[0209] The term “transfer” as used herein refers to the plating of the recombinant cells onto a different type of cells, and particularly onto monolayers of a different type of cells. These latter cells are competent to sustain both the replication and the production of infectious MV-CoV particles, i.e., respectively the formation of infectious viruses inside the cell and possibly the release of these infectious viruses outside of the cells. This transfer results in the co-culture of the recombinant cells of the invention with competent cells as defined in the previous sentence. The above transfer may be an additional, i.e., optional, step when the recombinant cells are not sufficiently efficient virus-producing culture, i.e., when infectious MV-CoV particles cannot be efficiently recovered from these recombinant cells.

[0210] As used herein, the phrase “effective dose” in reference to a dose or amount of a vaccine composition disclosed herein refers to a dose required to elicit antibodies and/or a cellular immune response that significantly reduce the likelihood or severity of infectivity of an infectious agent, e.g., coronavirus, during a subsequent challenge. In some embodiments, the effective dose is a dose listed in a package insert for the vaccine composition.

[0211] As used herein, when referring to a prophylactic composition, such as a vaccine, the term “booster” refers to an extra administration of the immunogenic composition of the present disclosure, or of another prophylactic or therapeutic compound.

[0212] As used herein, the term “virus-like particle” (VLP) refers to a structure that comprises the measles virus structural proteins and at least one SARS-CoV-2 S polypeptide or immunogenic fragment thereof, as encoded by a nucleic acid construct of this disclosure, but does not comprise the nucleic acid construct. The VLPs of the invention are non-infectious and non-replicative.

[0213] As used herein, the terms “associated” or “in association” refer to the presence, in a unique composition, of two or more listed elements, such as a recombinant infectious replicating MV-CoV particle and a CoV protein and/or CoV containing VLP. The associated elements may be physically separate entities.

[0214] The term “identity,” as known in the art, refers to a relationship between the sequences of two or more polypeptides or polynucleotides, as determined by comparing the sequences. In the art, identity also means the degree of sequence relatedness between two sequences as determined by the number of matches between strings of two or more amino acid residues or nucleic acid residues. Identity measures the percent of identical matches between the smaller of two or more sequences with gap alignments (if any) addressed by a particular mathematical model or computer program (e.g., “algorithms”). Identity of related peptides can be readily calculated by known methods. The term “% identity” as it applies to polypeptide or polynucleotide sequences is defined as the percentage of residues (amino acid residues or nucleic acid residues) in the candidate amino acid or nucleic acid sequence that are identical with the residues in the amino acid sequence or nucleic acid sequence of a second sequence after aligning the sequences and introducing gaps, if necessary, to achieve the maximum percent identity. Methods and computer programs for the alignment are well known in the art. Identity depends on a calculation of percent identity but may differ in value due to gaps and penalties introduced in the calculation. Generally, variants of a particular polynucleotide or polypeptide have at least 40%, 45%, 50%, 55%, 60%, 65%, 70%, 75%, 80%, 85%, 90%, 91%, 92%, 93%, 94%, 95%, 96%, 97%, 98%, 99% but less than 100% sequence identity to that particular reference polynucleotide or polypeptide as determined by sequence alignment programs and parameters described herein and known to those skilled in the art. Such tools for alignment include those of the BLAST suite (Stephen F. Altschul, et al. (1997). “Gapped BLAST and PSI-BLAST: a new generation of protein database search programs,” Nucleic Acids Res. 25:3389-3402). Another popular local alignment technique is based on the Smith-Waterman algorithm (Smith, T. F. & Waterman, M. S. (1981) “Identification of common molecular subsequences.” J. Mol. Biol. 147:195-197). A general global alignment technique based on dynamic programming is the Needleman-Wunsch algorithm (Needleman, S. B. & Wunsch, C. D. (1970) “A general method applicable to the search for similarities in the amino acid sequences of two proteins.” J. Mol. Biol. 48:443-453). More recently, a Fast Optimal Global Sequence Alignment Algorithm (FOGSAA) was developed that purportedly produces global alignment of nucleotide and protein sequences faster than other optimal global alignment methods, including the Needleman-Wunsch algorithm. Other tools are described herein, specifically in the definition of “identity” below.

[0215] As used herein, the term “homology” refers to the overall relatedness between polymeric molecules, e.g. between nucleic acid molecules (e.g. DNA molecules) and/or between polypeptide molecules. Polymeric molecules (e.g. nucleic acid molecules (e.g. DNA molecules) and/or polypeptide molecules) that share a threshold level of similarity or identity determined by alignment of matching residues are termed homologous. Homology is a qualitative term that describes a relationship between molecules and can be based upon the quantitative similarity or identity. Similarity or identity is a quantitative term that defines the degree of sequence match between two compared sequences. In some embodiments, polymeric molecules are “homologous” to one another if their sequences are at least 25%, 30%, 35%, 40%, 45%, 50%, 55%, 60%, 65%, 70%, 75%, 80%, 85%, 90%, 95%, 96%, 97%, 98% or 99% identical or similar. The term “homologous” necessarily refers to a comparison between at least two sequences (polynucleotide or polypeptide sequences). Two polynucleotide sequences are considered homologous if the polypeptides they encode are at least 50%, 60%, 70%, 80%, 90%, 95%, or even 99% for at least one stretch of at least 20 amino acids. In some embodiments, homologous polynucleotide sequences are characterized by the ability to encode a stretch of at least 4-5 uniquely specified amino acids. For polynucleotide sequences less than 60 nucleotides in length, homology is determined by the ability to encode a stretch of at least 4-5 uniquely specified amino acids. Two protein sequences are considered homologous if the proteins are at least 50%, 60%, 70%, 80%, or 90% identical for at least one stretch of at least 20 amino acids.

[0216] Homology implies that the compared sequences diverged in evolution from a common origin. The term “homolog” refers to a first amino acid sequence or nucleic acid sequence (e.g., gene (DNA or RNA) or protein sequence) that is related to a second amino acid sequence or nucleic acid sequence by descent from a common ancestral sequence. The term “homolog” may apply to the relationship between genes and/or proteins separated by the event of speciation or to the relationship between genes and/or proteins separated by the event of genetic duplication. “Orthologs” are genes (or proteins) in different species that evolved from a common ancestral gene (or protein) by speciation. Typically, orthologs retain the same function during evolution. “Paralogs” are genes (or proteins) related by duplication within a genome. Orthologs retain the same function during evolution, whereas paralogs evolve new functions, even if the new functions are related to the original function.

[0217] As used herein, the term “variant” is a molecule that differs in its amino acid sequence or nucleic acid sequence relative to a native sequence or a reference sequence. Sequence variants may possess substitutions, deletions, insertions, or a combination of any two or three of the foregoing, at certain positions within the sequence, as compared to a native sequence or a reference sequence. Ordinarily, variants possess at least 50% identity to a native sequence or a reference sequence. In some embodiments, variants share at least 80% identity or at least 90%, 91%, 92%, 93%, 94%, 95%, 96%, 97%, 98% or 99% identity with a native sequence or a reference sequence.

[0218] As defined herein, the term “6P” refers to a mutation of 6 amino acid residues, i.e. mutation by substitution of six proline residues at positions 817, 892, 899, 942, 986 and 987 (F817P+A892P+A899P+A942P+K986P+V987P) of the amino acid sequence of the S protein of SARS-CoV-2 of SEQ ID NO: 3, that maintains the S protein in the pre-fusion form, said mutation occurring in the S2 domain (Hsieh et al., 2020). The K986P and V987P mutations occur between the heptad repeat 1 (HR1) and the central helix (CH), the F817P, A892P and A899P occur in the connecting region between the fusion peptide (FP) and HR1, and the A942P mutation occurs in HR1.

[0219] As defined herein, the term “CC” refers to a mutation by substitution of two cysteine residues at positions 383 and 985 (S383C and D985C) of the amino acid sequence of the S protein of SARS-CoV-2 of SEQ ID NO: 3 or a mutation by substitution of two cysteine residues at positions 413 and 987 (G413C and P987C) of the amino acid sequence of the S protein of SARS-CoV-2 of SEQ ID NO: 3 that keeps the receptor-binding domain (RBD) in the closed conformation (McCallum et al., 2020).

[0220] As defined herein, the term “foldon” refers to an artificial trimerization domain, in particular the T4 foldon (i.e. the trimerization domain of the fibritin of the bacteriophage T4) that promotes trimerization of the ectodomain of the S protein and allows its expression in soluble trimeric form, i.e. soluble trimerized form of the S protein. For example, the T4 foldon has been used in the sequences of SEQ ID NO: 16, SEQ ID NO: 17, SEQ ID NO: 18, SEQ ID NO: 19, SEQ ID NO: 51 and SEQ ID NO: 52. Another example of a foldon is the GCN4 foldon, which is derived from the trimerization domain of yeast GCN4 transactivator.

[0221] As defined herein, the term “ΔF” refers to a mutation by substitution of three amino acid residues occurring in the S1/S2 furin cleavage site at positions 682, 683 and 685 of the amino acid sequence of the S protein of SARS-CoV-2 of SEQ ID NO: 3: R682G+R683S+R685G.

[0222] As defined herein, the term “ΔF” refers to the deletion of the loop encompassing the S1/S2 furin cleavage site between amino acid at position 675 and amino acid at position 685 of the S protein of SARS-CoV-2 of SEQ ID NO: 3, i.e. deletion of the amino acid sequence QTQTNSPRRAR of SEQ ID NO: 50.

[0223] As defined herein, the “S3F polypeptide of SARS-CoV-2” refers to a polypeptide comprising a stabilized S protein, wherein the S1/S2 furin cleavage site has been inactivated, e.g. by mutation of 3 amino acid residues at positions 682, 683 and 685 (R682G+R683S+R685G) of the amino acid sequence of the S protein of SARS-CoV-2 of SEQ ID NO: 3.

[0224] As defined herein, the “S2P3F polypeptide of SARS-CoV-2” refers to a polypeptide comprising a stabilized S protein with a 2P mutation at positions 986 and 987 (K986P+V987P) of the amino acid sequence of the S protein of SARS-CoV-2 of SEQ ID NO: 3 and inactivation of the S1/S2 furin cleavage site, e.g. by mutation of 3 amino acid residues at positions 682, 683 and 685 (R682G+R683S+R685G) of the amino acid sequence of the S protein of SARS-CoV-2 of SEQ ID NO: 3.

[0225] As defined herein, the “S2PΔF polypeptide of SARS-CoV-2” is directed to a polypeptide comprising a stabilized S protein with a 2P mutation at positions 986 and 987 (K986P+V987P) of the amino acid sequence of the S protein of SARS-CoV-2 of SEQ ID NO: 3 and deletion of the loop encompassing the S1/S2 furin cleavage site, i.e. deletion of the amino acid sequence QTQTNSPRRAR of SEQ ID NO: 50 between position 675 and 685 of the amino acid sequence of the S protein of SARS-CoV-2 of SEQ ID NO: 3. In the S2PΔF polypeptide of SARS-CoV-2, the 2P mutation occurs in positions 975 and 976 (K975P+V976P) of SEQ ID NO: 47.

[0226] As defined herein, the “S2PΔF2A polypeptide of SARS-CoV-2” is directed to a polypeptide comprising a stabilized S protein with a 2P mutation at positions 986 and 987 (K986P+V987P) of the amino acid sequence of the S protein of SARS-CoV-2 of SEQ ID NO: 3 and deletion of the loop encompassing the S1/S2 furin cleavage site, i.e. deletion of the amino acid sequence QTQTNSPRRAR of SEQ ID NO: 50 between position 675 and 685 of the amino acid sequence of the S protein of SARS-CoV-2 of SEQ ID NO: 3, with inactivation of the ERR signal, e.g. by mutation of 2 amino acid residues at positions 1269 and 1271 (K1269A+H1271A) of the amino acid sequence of the S protein of SARS-CoV-2 of SEQ ID NO: 3. In the S2PΔF2A polypeptide of SARS-CoV-2, the 2P mutation occurs in positions 975 and 976 (K975P+V976P) of SEQ ID NO: 49 and inactivation of the ERR signal occurs e.g. by mutation of 2 amino acid residues at positions 1258 and 1260 (K1258A+H1260A) of the amino acid sequence of SEQ ID NO: 49.

[0227] As defined herein, the “T4-S2P3F polypeptide of SARS-CoV-2” (also named tristab-Secto-3F) refers to a polypeptide comprising a soluble trimerized form of the S protein with 2P and 3F mutations, in particular a polypeptide comprising a T4 foldon trimerization domain, a stabilized S protein with a 2P mutation at positions 986 and 987 (K986P+V987P) of the amino acid sequence of the S protein of SARS-CoV-2 of SEQ ID NO: 3 and inactivation of the S1/S2 furin cleavage site, e.g. by mutation of 3 amino acid residues at positions 682, 683 and 685 (R682G+R683S+R685G) of the amino acid sequence of the S protein of SARS-CoV-2 of SEQ ID NO: 3.

[0228] As defined herein, the “S6P polypeptide” of SARS-CoV-2 or the “S_{MVopt}6P polypeptide” of SARS-CoV-2 refers to a polypeptide comprising a stabilized S protein with a 6P mutation at positions 817, 892, 899, 942, 986 and 987 (F817P+A892P+A899P+A942P+K986P+V987P) of the amino acid sequence of the S protein of SARS-CoV-2 of SEQ ID NO: 3.

[0229] As defined herein, the “S6P3F polypeptide” of SARS-CoV-2 or the “S_{MVopt}6P3F polypeptide” of SARS-CoV-2 refers to a polypeptide comprising a stabilized S protein with a 6P mutation at positions 817, 892, 899, 942, 986 and 987 (F817P+A892P+A899P+A942P+K986P+V987P) of the amino acid sequence of the S protein of SARS-CoV-2 of SEQ ID NO: 3 and inactivation of the S1/S2 furin cleavage site, e.g. by mutation of 3 amino acid residues at positions 682, 683 and 685 (R682G+R683S+R685G) of the amino acid sequence of the S protein of SARS-CoV-2 of SEQ ID NO: 3.

[0230] As defined herein, the “S6PΔF polypeptide” of SARS-CoV-2 or the “S_{MVopt}6PΔF polypeptide” of SARS-CoV-2 refers to a polypeptide comprising a stabilized S protein with a 6P mutation at positions 817, 892, 899, 942, 986 and 987 (F817P+A892P+A899P+A942P+K986P+V987P) of the amino acid sequence of the S protein of SARS-CoV-2 of SEQ ID NO: 3 and deletion of the loop encompassing the S1/S2 furin cleavage site, i.e. deletion of the amino acid sequence QTQTNSPRRAR of SEQ ID NO: 50 between position 675 and 685 of the amino acid sequence of the S protein of SARS-CoV-2 of SEQ ID NO: 3. In the S6PΔF polypeptide of SARS-CoV-2, the 6P mutation occurs at positions 806, 881, 888, 931, 975 and 976 of SEQ ID NO: 58.

[0231] As defined herein, the “SCCPP polypeptide” of SARS-CoV-2 refers to a polypeptide comprising a stabilized S protein with a 2P mutation at positions 986 and 987 (K986P+V987P) of the amino acid sequence of the S protein of SARS-CoV-2 of SEQ ID NO: 3 and a CC mutation at positions 383 and 985 (S383C and D985C) of the amino acid sequence of the S protein of SARS-CoV-2 of SEQ ID NO: 3.

[0232] As defined herein, the “SCC6P polypeptide” of SARS-CoV-2 refers to a polypeptide comprising a stabilized S protein with a 6P mutation at positions 817, 892, 899, 942, 986 and 987 (F817P+A892P+A899P+A942P+K986P+V987P) of the amino acid sequence of the S protein of SARS-CoV-2 of SEQ ID NO: 3 and a CC mutation at positions 383 and 985 (S383C and D985C) of the amino acid sequence of the S protein of SARS-CoV-2 of SEQ ID NO: 3.

[0233] As used herein, the phrase “full length S protein” refers to a coronavirus spike (S) protein that includes both the S1 and S2 domains. A full length S protein may include mutations (substitutions, deletions, and/or additions), but is not missing an entire S1 or S2 domain. A full length S protein may include a furin cleavage site, or a mutated furin cleavage site between the S1 and S2 domains.

[0234] Biology of the Coronavirus

[0235] SARS-CoV-2 is an enveloped single-stranded positive-sense RNA virus belonging to the Coronavidae family and the β-coronavirus genus (Zhou, 2020). Whole genome sequencing of SARS-CoV-2 revealed 79.6% nucleotide sequence similarity with SARS-CoV-1 (Wu, 2020). The genome of SARS-CoV-2 encodes 4 structural proteins: the spike protein (S), the envelope protein (E), the membrane protein (M), and the nucleocapsid (N). The S protein, a trimeric class I fusion protein localized on the surface of the virion, plays a central role in viral attachment and entry into host cells. Cleavage of the S protein into S1 and S2 subunits by host proteases (Jaimes, 2020) is essential for viral infection. The S1 subunit contains the receptor-binding-domain (RBD), which enables the virus to bind to its entry receptor, the angiotensin-converting enzyme 2 (ACE2) (Zhou, 2020; Hoffmann, 2020). After docking with the receptor, the S1 subunit is released and the S2 subunit reveals its fusion peptide to mediate membrane fusion and viral entry (Du, 2020).

[0236] The coronavirus replicates in the cytoplasm of the host cells. The 5′ end of the RNA genome has a capped structure and the 3′ end contains a polyA tail. The envelope of the virus comprises, at its surface, peplomeric structures called spicules (or spike protein).

[0237] The genome comprises the following open reading frames or ORFs, from its 5′ end to its 3′ end: ORF1a and ORF1b corresponding to the proteins of the transcription-replication complex, and ORF-S, ORF-E, ORF-M and ORF-N corresponding to the structural proteins S, E, M and N. It also comprises ORFs corresponding to proteins of unknown function encoded by the region situated between ORF-S and ORF-E and overlapping the latter, the region situated between ORF-M and ORF-N, and the region included in ORF-N.

[0238] The S protein is a membrane glycoprotein (200-220 kDa) existing in the form of spicules or spikes emerging from the surface of the viral envelope. It is responsible for the attachment of the virus to the receptors of the host cell and for inducing the fusion of the viral envelope with the cell membrane. The S protein may be functionally divided into two sub-regions S1 and S2 wherein S1 forms the head of the S protein involved in the binding to the virus receptor on host cells and S2 forms a stalk structure. The S protein contains the major epitopes targeted by neutralizing antibodies and is thus considered as a main antigen for developing vaccines against human coronaviruses (Du, 2020; Escriou, 2014; Liniger, 2008; Bodmer, 2018; Zhu, 2020). Antibodies targeting the RBD may neutralize virus by blocking viral binding to receptors on host cells and preventing entry. Additionally, it has been observed that synthetic peptides mimicking and antibodies targeting the second heptad region (HR2) in the S2 subunit of SARS-CoV have strong neutralizing activity (Bosh, 2004; Keng, 2005; Lip, 2006; Zhang, 2004; Zhong, 2005), likely by preventing the conformational changes required for membrane fusion. Efforts to develop a SARS-CoV-2 vaccine have thus focused on eliciting responses against the S protein.

[0239] The small envelope protein (E), also called sM (small membrane), which is a nonglycosylated transmembrane protein of about 10 kDa, is the protein present in the smallest quantity in the virion. It is involved in the coronavirus budding process which occurs at the level of the intermediate compartment in the endoplasmic reticulum (ER) and the Golgi apparatus.

[0240] The M protein or matrix protein (25-30 kDa) is a more abundant membrane glycoprotein which is integrated into the viral particle by an M/E interaction, whereas the incorporation of S into the particles is directed by an S/M interaction. It appears to be important for the viral maturation of coronaviruses and for the determination of the site where the viral particles are assembled.

[0241] The N protein or nucleocapsid protein (45-50 kDa) which is the most conserved among the coronavirus structural proteins is necessary for encapsidating the genomic RNA and then for directing its incorporation into the virion. This protein is probably also involved in the replication of the RNA.

[0242] When the host cell is infected, the reading frame (ORF) situated in the 5′ region of the viral genome is translated into a polyprotein which is cleaved by the viral proteases and then releases several nonstructural proteins such as the RNA-dependent RNA polymerase (Rep) and the ATPase helicase (Hel). These two proteins are involved in the replication of the viral genome and in the generation of transcripts which are used in the synthesis of the viral proteins. The mechanisms by which these subgenomic mRNAs are produced are not completely understood; however, recent facts indicate that the sequences for regulation of transcription at the 5′ end of each gene represent signals which regulate the discontinuous transcription of the subgenomic mRNAs.

[0243] The proteins of the viral membrane (S, E and M proteins) are inserted into the intermediate compartment, whereas the replicated RNA (+ strand) is assembled with the N (nucleocapsid) protein. This protein-RNA complex then combines with the M protein contained in the membranes of the endoplasmic reticulum and the viral particles form when the nucleocapsid complex buds into the endoplasmic reticulum. The virus then migrates across the Golgi complex and eventually leaves the cell, for example by exocytosis. The site of attachment of the virus to the host cell is at the level of the S protein.

[0244] Recombinant Measles Viruses

[0245] With the aim of developing a vaccine against existing or emerging, possibly pandemic coronaviruses, in particular a vaccine that could be used in children (in particular in young children or babies) or in adult population or both, the inventors designed a strategy based on the expression of polypeptides derived from selected antigens (or suitable portion(s) thereof) by a measles virus vector, wherein in particular the measles virus (MV or MeV) is selected from live attenuated measles viruses such as vaccine measles viruses. In certain embodiments the live attenuated measles virus is the Schwarz strain.

[0246] The invention proposes a new approach to provide coronavirus antigens or polypeptides derived therefrom including spike derived antigens to the immune system of the host and especially provides use of measles virus vector to express such polypeptides or antigens, in particular for eliciting an immune response in a mammalian host, especially a human host, to confer protection, especially preventive protection, against the disease caused by coronavirus in particular SARS-CoV-2 strain. This approach using measles virus as a vector of the immunogenic polypeptides of coronavirus also takes benefits from the vector properties in particular of the immune properties of the vector to improve the quality of the immune response in the host. The inventors hence provide a recombinant infectious live attenuated measles virus, such as recombinant measles virus obtained using the Schwarz strain, capable of eliciting an immune response in mammalian, in particular in human individuals that would be effective and long lasting against illness resulting from coronavirus infection, especially from SARS-CoV-2 infection.

[0247] The invention thus relates to the use of measles virus as a vector to express coronavirus immunogens or epitopes of coronavirus antigens. In some embodiments said immunogens or epitopes encompass or derive from polypeptides derived from the wild type antigens of the SARS-CoV-2 as generally described hereabove such as the S, E, N, ORF3a, ORF8, ORF7a and M proteins of a coronavirus or specifically described for the SARS-CoV-2 strain and illustrated in the present description.

[0248] The recombinant measles virus particles may express a wild type SARS-CoV-2 antigen, fragments thereof that comprise epitopes sufficient for eliciting an immune response in a mammalian host, or mutated or truncated antigens, wherein the mutations or truncations or the fragments resulting from deletions of amino acid residues or of regions of the native antigen preserve the immunogenic properties of the antigen and enable their production or their use in immunogenic compositions. Accordingly mutated antigens or fragments of antigens may have improved stability in cells and/or enable recovery of solubilized forms of the antigens and/or multimeric forms of the antigens, in particular trimers thereof (such as for the spike derived antigens). The polypeptides disclosed herein especially originate from the CoV, in particular from SARS-CoV-2, and are structural proteins that may be identical to native proteins or alternatively that may be derived thereof by mutation, especially targeted point mutations, including by substitution (in particular by conservative amino acid residues) or by addition of amino acid residues or by secondary modification after translation (including glycosylation) or by deletion of portions of the native proteins(s) resulting in fragments having a shortened size with respect to the native protein of reference. Fragments are encompassed within the present invention to the extent that they bear epitopes of the native protein suitable for eliciting an immune response in a host in particular in a mammalian host, especially a human host, preferably a response that enables the protection against CoV, in particular SARS-CoV-2. Epitopes are in particular of the type of B cell epitopes involved in eliciting a humoral immune response through the activation of the production of antibodies in a host to whom the protein has been administered or in whom it is expressed following administration of the infectious replicative particles of the invention. Epitopes may alternatively be of the type of T cell epitopes involved in elicitation of Cell Mediated Immune response (CMI response). Fragments may have a size representing more than 50% of the amino-acid sequence size of the native protein of CoV, in particular of SARS-CoV-2, preferably at least 90% or 95%. Alternatively, fragments may be short polypeptides with at least 10 amino acid residues, which harbor epitope(s) of the native protein. Fragments in this respect also include polyepitopes as defined herein. In a particular embodiment the polypeptide is a fragment of the native antigen that contains or consists in the soluble portion of the antigen and/or is point mutated (such as with 1, 2 or by less than 5% substitutions in the amino acid residues of the native antigen). Mutations may be designed to improve its stability in the cells. The polypeptides (such as the S polypeptide) may in particular be expressed as trimeric or trimerized forms of the coronavirus native or modified antigens. The words “polypeptide” and “antigens” are used interchangeably to define a “polypeptide of the coronavirus in particular of SARS-CoV-2” according to the invention in accordance with the definition provided herein. The amino acid sequence of a polypeptide is hence either identical to a counterpart in an antigen of a strain of CoV, in particular SARS-CoV-2, including for a polypeptide which is a native mature or precursor protein of CoV, or is modified by insertion, substitution, or deletion to define an immunogenic fragment thereof or a variant thereof.

[0249] In particular a fragment or a variant having at least 50%, at least 80%, at least 90% or at least 95% amino acid sequence identity to a naturally occurring CoV polypeptide. Amino acid sequence identity can be determined as defined herein. Fragments or mutants of CoV proteins of the invention may be defined with respect to the particular amino acid sequences illustrated herein.

[0250] In a first aspect of the invention, heterologous polypeptides for expression by the recombinant measles virus are derived from glycoprotein S of a coronavirus, in particular of SARS-CoV-2: they may be the S polypeptide as such in its glycosylated or non-glycosylated form, or they may be fragments thereof such as immunogenic fragments S1 and/or S2 or shorter fragments thereof, including shorter fragments of the full-length S polypeptides that are devoid of or modified in functional domain(s), i.e, domain(s) that impact the life cycle of the virus. According to the invention, fragments of the S polypeptide of the coronavirus, especially of SARS-CoV-2 comprise epitopes suitable to elicit an immune response in the context of the recombinant virus particles. Particular fragments of S or mutated fragments of S or mutated antigens of S according to the invention are the polypeptides listed below, especially encoded by the nucleotide sequence disclosed hereafter or having the amino acid sequence described herein: S polypeptide of SARS-CoV-2, stab-S polypeptide of SARS-CoV-2 (also named S2P polypeptide of SARS-CoV-2), Secto polypeptide of SARS-CoV-2, stab-Secto polypeptide of SARS-CoV-2, S1 polypeptide of SARS-CoV-2, S2 polypeptide of SARS-CoV-2, tri-Secto polypeptide of SARS-CoV-2, tristab-Secto polypeptide of SARS-CoV-2, S3F polypeptide of SARS-CoV-2, S2P3F polypeptide of SARS-CoV-2, S2PΔF polypeptide of SARS-CoV-2, S2PΔF2A polypeptide of SARS-CoV-2, T4-S2P3F (tristab-Secto-3F) polypeptide of SARS-CoV-2, S6P polypeptide of SARS-CoV-2, S6P3F polypeptide of SARS-CoV-2, S6PΔF polypeptide of SARS-CoV-2, SCCPP polypeptide of SARS-CoV-2, SCC6P polypeptide of SARS-CoV-2, S_{MVopt}2P polypeptide of SARS-CoV-2, S_{MVopt}ΔF polypeptide of SARS-CoV-2, S_{MVopt}2PΔF polypeptide of SARS-CoV-2, preferably is selected from the group consisting of S, stab-S (also named S2P), S3F, S2P3F, S2PΔF and S2PΔF2A polypeptides of SARS-CoV-2. The fragments may be obtained from the wild type sequence or may be mutated and/or deleted with respect to the wild type sequence. Preferred fragments of S or mutated fragments of S according to the invention are selected from the group consisting of S polypeptide of SARS-CoV-2, stab-S polypeptide of SARS-CoV-2 (also named S2P polypeptide of SARS-CoV-2), S3F polypeptide of SARS-CoV-2, S2P3F polypeptide of SARS-CoV-2, S2PΔF polypeptide of SARS-CoV-2, S2PΔF2A polypeptide of SARS-CoV-2, T4-S2P3F (tristab-Secto-3F) polypeptide of SARS-CoV-2, S6P polypeptide of SARS-CoV-2, S6P3F polypeptide of SARS-CoV-2, S6PΔF polypeptide of SARS-CoV-2, SCCPP polypeptide of SARS-CoV-2, SCC6P polypeptide of SARS-CoV-2, S_{MVopt}2P polypeptide of SARS-CoV-2, S_{MVopt}ΔF polypeptide of SARS-CoV-2 and S_{MVopt}2PΔF polypeptide of SARS-CoV-2. More preferred fragments of S or mutated fragments of S or mutated antigens of S according to the invention are selected from the group consisting of S2P3F polypeptide of SARS-CoV-2, S2PΔF polypeptide of SARS-CoV-2, S2PΔF2A polypeptide of SARS-CoV-2, preferably S2PΔF polypeptide of SARS-CoV-2, more preferably S2PΔF2A polypeptide of SARS-CoV-2.

[0251] Preferably, 1, 2, 3 or more amino acid mutation(s), i.e. amino acid substitution(s), insertion(s) and/or deletion(s), is(are) introduced into the amino acid sequence of the S protein of CoV, in particular coronavirus SARS-CoV-2:
[0252] to maintain the expressed protein in its prefusion state (2P mutation), and/or
[0253] to prevent S1/S2 cleavage (furin cleavage site inactivation, either through 3F mutation or through ΔF deletion of the encompassing loop), and/or
[0254] to inactivate the Endoplasmic Reticulum retrieval signal (ERRS) (2A mutation as defined below), and/or
[0255] to maintain the receptor-binding domain (RBD) localized in the S1 domain of the S protein in the closed conformation (i.e. in down position or in a closed down state).

[0256] In another aspect of the invention heterologous polypeptides for expression by the recombinant measles virus are derived from one of the following antigens of a coronavirus, in particular of SARS-CoV-2, E, N, ORF3a, ORF8, ORF7a or M proteins, in particular N protein.

[0257] The invention thus relates to a nucleic acid construct comprising:
[0258] (1) a cDNA molecule encoding a full length, infectious antigenomic (+) RNA strand of a measles virus (MV); and
[0259] (2) a first heterologous polynucleotide encoding at least one polypeptide of a coronavirus (CoV), in particular of SARS-CoV-2, in particular said first polynucleotide encoding at least the spike (S) polypeptide of a coronavirus (CoV), in particular of coronavirus SARS-CoV-2, or an immunogenic fragment thereof, or a variant of the S polypeptide or fragment thereof that has 1, 2, 3 or more amino acid substitution(s), insertion(s) and/or deletion(s), including those especially disclosed above, and wherein the first heterologous polynucleotide is positioned (operatively cloned) within an additional transcription unit (ATU) inserted within the cDNA of the antigenomic (+) RNA to provide a recombinant MV-CoV, in particular MV-CoVS nucleic acid molecule.

[0260] In a preferred embodiment of the invention, the nucleic acid construct comprises:
[0261] (1) a cDNA molecule encoding a full length, infectious antigenomic (+) RNA strand of a measles virus (MV); and
[0262] (2) a first heterologous polynucleotide encoding
   [0263] (a) a full length spike (S) protein of SARS-CoV-2 of SEQ ID NO: 3, or
   [0264] (b) an immunogenic fragment of the full length S protein in (a) selected from the group consisting of the S1 polypeptide of SEQ ID NO: 11, the S2 polypeptide of SEQ ID NO: 13, the Secto polypeptide of SEQ ID NO: 7 and the tri-Secto polypeptide of SEQ ID NO: 16, or
   [0265] (c) a variant of (a) or (b) that has 1, 2, 3 or more amino acid residue substitution(s), insertion(s) and/or deletion(s), in particular less than 10, or less than 5 amino acid residue substitutions, insertions, and/or deletions, preferably a mutated antigen comprising
      [0266] (i) a mutation that maintains the expressed full length S protein in its prefusion conformation, in particular a mutation by substitution of amino acid residue(s) occurring in the S2 domain, preferably a mutation by substitution of at least two proline residues occurring in the S2 domain, and/or
      [0267] (ii) a mutation that inactivates the furin cleavage site of the S protein, in particular a mutation by insertion, substitution or deletion of amino acid residue(s) occurring in the S1/S2 furin cleavage site, and/or
      [0268] (iii) a mutation that inactivates the Endoplasmic Reticulum Retrieval Signal (EERS), and/or
      [0269] (iv) a mutation that maintains the receptor-binding domain (RBD) localized in the S1 domain of the S protein in the closed conformation, and wherein the first heterologous polynucleotide is positioned in an additional transcription unit (ATU) located between the P gene and the M gene of the MV (ATU2) or in an ATU located downstream of the H gene of the MV (ATU3).

[0270] In a particular embodiment of the invention, in the nucleic acid construct:
[0271] (i) the mutation that maintains the expressed full length S protein in its prefusion conformation is a mutation by substitution of two proline residues at positions 986 and 987 (K986P and V987P) of the amino acid sequence of the S protein of SARS-CoV-2 of SEQ ID NO: 3, or a mutation by substitution of six proline residues at positions 817, 892, 899, 942, 986 and 987 (F817P, A892P, A899P, A942P, K986P and V987P) of the amino acid sequence of the S protein of SARS-CoV-2 of SEQ ID NO: 3, and/or
[0272] (ii) the mutation that inactivates the furin cleavage site of the S protein is a mutation by substitution of three amino acid residues occurring in the S1/S2 furin cleavage site at positions 682, 683 and 685 (R682G, R683S and R685G) of the amino acid sequence of the S protein of SARS-CoV-2 of SEQ ID NO: 3, or a mutation by deletion of the loop encompassing the S1/S2 furin cleavage site between amino acid at position 675 and amino acid at position 685 of the S protein of SARS-CoV-2 of SEQ ID NO: 3, the loop consisting of the amino acid sequence QTQTNSPRRAR of SEQ ID NO: 50, and/or
[0273] (iii) the mutation that inactivates the EERS is a mutation by substitution of two alanine residues at positions 1269 and 1271 of the amino acid sequence of SEQ ID NO: 3, and/or
[0274] (iv) the mutation that maintains the RBD localized in the S1 domain of the S protein in the closed conformation is a mutation by substitution of two cysteine residues at positions 383 and 985 (S383C and D985C) of the amino acid sequence of the S protein of SARS-CoV-2 of SEQ ID NO: 3 or a mutation by substitution of two cysteine residues at positions 413 and 987 (G413C and P987C) of the amino acid sequence of the S protein of SARS-CoV-2 of SEQ ID NO: 3; and/or
[0275] (v) the variant in (c) encodes a polypeptide comprising a mutation selected from the group consisting of a deletion of the amino acid residues at positions 69 and 70 of the amino acid sequence of SEQ ID NO: 3, a deletion of the amino acid residues at positions 144 and 145 of the amino acid sequence of SEQ ID NO: 3, a mutation by substitution of the tyrosine residue at position 501 of the amino acid sequence of SEQ ID NO: 3 (N501Y), a mutation by substitution of the aspartic acid residue at position 570 of the amino acid sequence of SEQ ID NO: 3 (A570D), a mutation by substitution of the histidine residue at position 681 of the amino acid sequence of SEQ ID NO: 3 (P681H), a mutation by substitution of the isoleucine residue at position 716 of the amino acid sequence of SEQ ID NO: 3 (T7161), a mutation by substitution of the alanine residue at position 982 of the amino acid sequence of SEQ ID NO: 3 (S982A), a mutation by substitution of the histidine residue at position 1118 of the amino acid sequence of SEQ ID NO: 3 (D1118H), a mutation by substitution of the lysine residue at position 484 of the amino acid sequence of SEQ ID NO: 3 (E484K), a mutation by substitution of the asparagine residue at position 417 of the amino acid sequence of SEQ ID NO: 3 (K417N), a mutation by substitution of the threonine residue at position 417 of the amino acid sequence of SEQ ID NO: 3 (K417T) and a mutation by substitution of the glycine residue at position 614 of the amino acid sequence of SEQ ID NO: 3 (D614G), in particular a mutation selected from the group consisting of a mutation by substitution of the tyrosine residue at position 501 of the amino acid sequence of SEQ ID NO: 3 (N501Y), a mutation by substitution of the lysine residue at position 484 of the amino acid sequence of SEQ ID NO: 3 (E484K), a mutation by substitution of the asparagine residue at position 417 of the amino acid sequence of SEQ ID NO: 3 (K417N) and a mutation by substitution of the threonine residue at position 417 of the amino acid sequence of SEQ ID NO: 3 (K417T).

[0276] In some embodiments, the SARS-CoV-2 antigenic polypeptide is a full length S protein of SARS-CoV-2 of SEQ ID NO: 3.

[0277] In some embodiments, the immunogenic fragment or the antigenic fragment of the full length S protein is selected from the group consisting of the S1 polypeptide of SEQ ID NO: 11, the S2 polypeptide of SEQ ID NO: 13, the Secto polypeptide of SEQ ID NO: 7 and the tri-Secto polypeptide of SEQ ID NO: 16.

[0278] In some embodiments, the full length S protein of SARS-CoV-2 antigenic polypeptide further comprises one or more additional substitutions that maintain(s) the expressed full length S protein in its prefusion conformation. In some embodiments, the full length S protein further comprises the amino acid mutations K986P and V987P of SEQ ID NO: 3, or the amino acid mutations F817P, A892P, A899P, A942P, K986P and V987P of SEQ ID NO: 3.

[0279] In some embodiments, the full length S protein of SARS-CoV-2 antigenic polypeptide further comprises one or more additional substitutions that inactivate(s) the furin cleavage site of the S protein. In some embodiments, the full length S protein further comprises the amino acid mutations R682G, R683S and R685G of SEQ ID NO: 3, or the deletion of the loop encompassing the S1/S2 furin cleavage site between amino acid at position 675 and amino acid at position 685 of the S protein of SARS-CoV-2 of SEQ ID NO: 3, the loop consisting of the amino acid sequence QTQTNSPRRAR of SEQ ID NO: 50.

[0280] In some embodiments, the full length S protein of SARS-CoV-2 antigenic polypeptide further comprises one or more additional substitutions that inactivate(s) the EERS. In some embodiments, the full length S protein further comprises a substitution of two alanine residues at positions 1269 and 1271 of the amino acid sequence of SEQ ID NO: 3.

[0281] In some embodiments, the full length S protein of SARS-CoV-2 antigenic polypeptide further comprises one or more additional substitutions that maintains the RBD localized in the S1 domain of the S protein in the closed conformation. In some embodiments, the full length S protein further comprises the amino acid mutations S383C and D985C of SEQ ID NO: 3. In some embodiments, the full length S protein further comprises the amino acid mutations G413C and P987C of SEQ ID NO: 3.

[0282] In some embodiments, the full length S protein of SARS-CoV-2 antigenic polypeptide further comprises a deletion of the amino acid residues at positions 69 and 70 of the amino acid sequence of SEQ ID NO: 3. In some embodiments, the full length S protein of SARS-CoV-2 antigenic polypeptide further comprises a deletion of the amino acid residues at positions 144 and 145 of the amino acid sequence of SEQ ID NO: 3. In some embodiments, the full length S protein of SARS-CoV-2 antigenic polypeptide further comprises the amino acid mutation N501Y of SEQ ID NO: 3. In some embodiments, the full length S protein of SARS-CoV-2 antigenic polypeptide further comprises the amino acid mutation A570D of SEQ ID NO: 3. In some embodiments, the full length S protein of SARS-CoV-2 antigenic polypeptide further comprises the amino acid mutation P681H of SEQ ID NO: 3. In some embodiments, the full length S protein of SARS-CoV-2 antigenic polypeptide further comprises the amino acid mutation T7161 of SEQ ID NO: 3. In some embodiments, the full length S protein of SARS-CoV-2 antigenic polypeptide further comprises the amino acid mutation S982A of SEQ ID NO: 3. In some embodiments, the full length S protein of SARS-CoV-2 antigenic polypeptide further comprises the amino acid mutation D1118H of SEQ ID NO: 3. In some embodiments, the full length S protein of SARS-CoV-2 antigenic polypeptide further comprises the amino acid mutation E484K of SEQ ID NO: 3. In some embodiments, the full length S protein of SARS-CoV-2 antigenic polypeptide further comprises the amino acid mutation K417N of SEQ ID NO: 3. In some embodiments, the full length S protein of SARS-CoV-2 antigenic polypeptide further comprises the amino acid mutation K417T of SEQ ID NO: 3. In some embodiments, the full length S protein of SARS-CoV-2 antigenic polypeptide further comprises the amino acid mutation D614G of SEQ ID NO: 3.

[0283] In some embodiments, the mutated antigen of the full length S protein or of the immunogenic fragment or the antigenic fragment is (a) the TA-S2P3F polypeptide of SEQ ID NO: 52, or a variant thereof having at least 90% identity with SEQ ID NO: 52, wherein the variant does not vary at positions 682, 683, 685, 986 and 987; or (b) the S6P polypeptide of SEQ ID NO: 54, or a variant thereof having at least 90% identity with SEQ ID NO: 54, wherein the variant does not vary at positions 817, 892, 899, 942, 986 and 987; or (c) the S6P3F polypeptide of SEQ ID NO: 56, or a variant thereof having at least 90% identity with SEQ ID NO: 56, wherein the variant does not vary at positions 682, 683, 685, 817, 892, 899, 942, 986 and 987; or (d) the S6PΔF polypeptide of SEQ ID NO: 58, or a variant thereof having at least 90% identity with SEQ ID NO: 58, wherein the variant does not vary at positions 806, 881, 888, 931, 975 and 976; or (e) the SCCPP polypeptide of SEQ ID NO: 60, or a variant thereof having at least 90% identity with SEQ ID NO: 60, wherein the variant does not vary at positions 383, 985, 986 and 987; or (f) the SCC6P polypeptide of SEQ ID NO: 62, or a variant thereof having at least 90% identity with SEQ ID NO: 62, wherein the variant does not vary at positions 383, 817, 892, 899, 942, 985, 986 and 987; or (g) the S_{MVopt}2P polypeptide of SEQ ID NO: 5, or a variant thereof having at least 90% identity with SEQ ID NO: 5, wherein the variant does not vary at positions 986 and 987; or (h) the S_{MVopt}ΔF polypeptide of SEQ ID NO: 65, or a variant thereof having at least 90% identity with SEQ ID NO: 65; or (i) the S_{MVopt}2PΔF polypeptide of SEQ ID NO: 47, or a variant thereof having at least 90% identity with SEQ ID NO: 47, wherein the variant does not vary at positions 975 and 976; or (j) the S_{MVopt}6P polypeptide, or a variant thereof having at least 90% identity with the S_{MVopt}6P polypeptide, wherein the variant does not vary at positions 817, 892, 899, 942, 986 and 987; or (k) the S_{MVopt}6PΔF polypeptide, or a variant thereof having at least 90% identity with the S_{MVopt}6PΔF polypeptide, wherein the variant does not vary at positions 806, 881, 888, 931, 975 and 976; or (l) the S_{MVopt}6P3F polypeptide, or a variant thereof having at least 90% identity with the S_{MVopt}6P3F polypeptide, wherein the variant does not vary at positions 682, 683, 685, 817, 892, 899, 942, 986 and 987. In some embodiments, the mutated antigen is (a) the TA-S2P3F polypeptide of SEQ ID NO: 52; or (b) the S6P polypeptide of SEQ ID NO: 54, or (c) the S6P3F polypeptide of SEQ ID NO: 56, or (d) the S6PΔF polypeptide of SEQ ID NO: 58, or (e) the SCCPP polypeptide of SEQ ID NO: 60, or (f) the SCC6P polypeptide of SEQ ID NO: 62, or (g) the S_{MVopt}2P polypeptide of SEQ ID NO: 5, or (h) the S_{MVopt}ΔF polypeptide of SEQ ID NO: 65 or (i) the S_{MVopt}2PΔF polypeptide of SEQ ID NO: 47.

[0284] In some embodiments, the nucleic acid construct can be designed using the measles optimized-gene S_{MVopt} of SEQ ID NO: 36 instead of the fully optimized gene S of SEQ ID NO: 2.

[0285] In a particular embodiment, the first heterologous polynucleotide is positioned in an ATU2 located between the P gene and the M gene of the MV or in an ATU3 located downstream of the H gene of the MV. Preferably, the first heterologous polynucleotide is positioned in an ATU3 located downstream of the H gene of the MV.

[0286] A nucleic acid construct according to the invention is in particular a purified DNA molecule, obtained or obtainable by recombination of various polynucleotides of different origins, operably linked together. It is also and interchangeably designated as a cDNA as a result of the designation as a cDNA, of the molecule encoding a full length, infectious antigenomic (+) RNA strand of a measles virus (MV).

[0287] The expression “operatively linked” or “operably linked” refers to the functional link existing between the different polynucleotides of the nucleic acid construct of the invention such that the different polynucleotides and nucleic acid construct are efficiently transcribed and if appropriate translated, in particular in cells or cell lines, especially in cells or cell lines used as part of a rescue system for the production or amplification of recombinant infectious MV particles of the invention or in host cells, especially in mammalian or in human cells.

[0288] In another aspect of the invention, additional heterologous polypeptides for expression by the recombinant measles virus are derived from glycoprotein S of a coronavirus, in particular of SARS-CoV-2: they may be the S polypeptide as such in its glycosylated or non-glycosylated form, or they may be fragments thereof such as immunogenic fragments S1 and/or S2 or shorter fragments thereof, including shorter fragments of the full-length S polypeptides that are devoid of or modified in functional domain(s), i.e, domain(s) that impact the life cycle of the virus. According to the invention, fragments of the S polypeptide of the coronavirus, especially of SARS-CoV-2 comprise epitopes suitable to elicit an immune response in the context of the recombinant virus particles. Particular fragments of S or mutated fragments of S or mutated antigens of S according to the invention are the polypeptides listed below, especially encoded by the nucleotide sequence disclosed hereafter or having the amino acid sequence described herein: S polypeptide of SARS-CoV-2 (SEQ ID NO: 3), stab-S polypeptide of SARS-CoV-2 (also named S2P polypeptide of SARS-CoV-2) (SEQ ID NO: 5), Secto polypeptide of SARS-CoV-2 (SEQ ID NO: 7), stab-Secto polypeptide of SARS-CoV-2 (SEQ ID NO: 9), S1 polypeptide of SARS-CoV-2 (SEQ ID NO: 11), S2 polypeptide of SARS-CoV-2 (SEQ ID NO: 13), tri-Secto polypeptide of SARS-CoV-2 (SEQ ID NO: 17), tristab-Secto polypeptide of SARS-CoV-2 (SEQ ID NO: 19), or S mutated in the domain involved in endoplasmic reticulum retention. In some embodiments, S mutated in the domain involved in endoplasmic reticulum retention preferably is, or is derived from, S (SEQ ID NO: 3) or stab-S (also named S2P) (SEQ ID NO: 5) polypeptides of SARS-CoV-2. The fragments may be obtained from the wild type sequence or may be mutated and/or deleted with respect to the wild type sequence.

[0289] Preferred fragments of S or mutated fragments of S according to the invention are selected from the group consisting of S polypeptide of SARS-CoV-2 (SEQ ID NO: 3), stab-S polypeptide of SARS-CoV-2 (also named S2P polypeptide of SARS-CoV-2) (SEQ ID NO: 5).

[0290] Preferably, 1, 2, 3 or more amino acid mutation(s), i.e. amino acid substitution(s), insertion(s) and/or deletion(s), is(are) introduced into the amino acid sequence of the S protein of CoV, in particular SARS-CoV-2:
[0291] to maintain the expressed protein in its prefusion state (P2 mutation), and/or
[0292] to inactivate the Endoplasmic Reticulum retrieval signal (ERRS) (2A mutation or deletion of a KXHXX motif of SEQ ID NO: 149), and/or
[0293] to prevent the activity of intracellular retention, in particular retention involving cycling between Golgi and Endoplasmic Reticulum (ER) compartments.

[0294] In a particular embodiment, a mutation by insertion, substitution, or deletion in the cytoplasmic tail of the S protein at least impairs the retrieval of the polypeptide in the ER, wherein the mutation by insertion, substitution, or deletion is carried out in the 11 amino acid residue sequence of the S protein that aligns with positions 1263 to 1273 of the amino acid sequence of SEQ ID NO: 3 and encompasses a mutation by insertion, substitution, or deletion of all or part of the amino acid residues of the ERRS signal encompassing the KXHXX motif of SEQ ID NO: 149. The mutation in this particular domain allows transport of the resulting polypeptide to the plasma membrane of the cells.

[0295] In a particular embodiment, a mutation by insertion, substitution, or deletion in the cytoplasmic tail of the S protein at least increases cell surface expression of the dual domain S protein, wherein the mutation by insertion, substitution, or deletion is carried out in the 11 amino acid residues sequence of the S protein that may be aligned with positions 1263 to 1273 of the amino acid sequence of SEQ ID NO: 3 and encompasses a mutation by insertion, substitution, or deletion of all or part of the amino acid residues of the ERRS signal encompassing the KXHXX motif of SEQ ID NO: 149. The mutation in this particular domain allows transport of the resulting polypeptide to the plasma membrane of the cells. In a particular embodiment, the cell surface expression of the dual domain S protein having a mutation by insertion, substitution, or deletion in the cytoplasmic tail is increased by at least about 5%, about 10%, about 15%, about 20%, about 25%, about 30%, about 35%, about 40%, about 45%, about 50%, about 55%, about 60%, about 65%, about 70%, about 75%, about 80%, about 85%, about 90%, about 95%, or about 100%, compared to cell surface expression of wild type full length S protein. In a particular embodiment, the cell surface expression of the dual domain S protein having a mutation by insertion, substitution, or deletion in the cytoplasmic tail is increased by at least 5%, 10%, 15%, 20%, 25%, 30%, 35%, 40%, 45%, 50%, 55%, 60%, 65%, 70%, 75%, 80%, 85%, 90%, 95%, or 100%, compared to cell surface expression of wild type full length S protein. In a particular embodiment, the cell surface expression of the dual domain S protein having a mutation by insertion, substitution, or deletion in the cytoplasmic tail is increased from between about 1% and about 100%, between about 5% and about 100%, between about 10% and about 100%, between about 15% and about 100%, between about 20% and about 100%, between about 25% and about 100%, between about 30% and about 100%, between about 35% and about 100%, between about 40% and about 100%, between about 45% and about 100%, between about 50% and about 100%, between about 55% and about 100%, between about 60% and about 100%, between about 65% and about 100%, between about 70% and about 100%, between about 75% and about 100%, between about 80% and about 100%, between about 85% and about 100%, between about 90% and about 100%, or between about 95% and about 100%. In a particular embodiment, the cell surface expression of the dual domain S protein having a mutation by insertion, substitution, or deletion in the cytoplasmic tail is increased from between 1% and 100%, between 5% and 100%, between 10% and 100%, between 15% and 100%, between 20% and 100%, between 25% and 100%, between 30% and 100%, between 35% and 100%, between 40% and 100%, between 45% and 100%, between 50% and 100%, between 55% and 100%, between 60% and 100%, between 65% and 100%, between 70% and 100%, between 75% and 100%, between 80% and 100%, between 85% and 100%, between 90% and 100%, or between 95% and 100%.

[0296] In another aspect of the invention, the recombinant measles virus may express a second heterologous polypeptide, which is an antigenic polypeptide derived from one of the following antigens of a coronavirus, in particular of SARS-CoV-2, E (SEQ ID NO: 23), N (SEQ ID NO: 22), ORF3a (SEQ ID NO: 26), ORF8 (SEQ ID NO: 25), ORF7a (SEQ ID NO: 27) or M (SEQ ID NO: 24) proteins, in particular N (SEQ ID NO: 22) protein.

[0297] The invention thus relates to a nucleic acid construct comprising:
[0298] (1) a cDNA molecule encoding a full length antigenomic (+) RNA strand of an attenuated strain of measles virus (MV); and
[0299] (2) a first heterologous polynucleotide encoding at least one polypeptide of a coronavirus (CoV), in particular of coronavirus SARS-CoV-2, in particular said first polynucleotide encoding at least the spike (S) polypeptide of a coronavirus (CoV), in particular of coronavirus SARS-CoV-2, or an immunogenic fragment thereof that has 1, 2, 3 or more amino acid substitution(s), insertion(s) and/or deletion(s), including those especially disclosed above, and wherein the first heterologous polynucleotide is positioned within an additional transcription unit (ATU) inserted within the cDNA of the antigenomic (+) RNA to provide a recombinant MV-CoV, in particular MV-CoVS nucleic acid molecule.

[0300] In a preferred embodiment of the invention, the nucleic acid construct comprises:
[0301] (1) a cDNA molecule encoding a full length antigenomic (+) RNA strand of an attenuated strain of measles virus (MV); and
[0302] (2) a first heterologous polynucleotide encoding
   [0303] (a) a dual domain S protein polypeptide of SARS-CoV-2 comprising:
      [0304] a mutation by insertion, substitution, or deletion in the cytoplasmic tail of the dual domain S protein, wherein the mutation by insertion, substitution, or deletion is in the 11 amino acid residue sequence of the S protein aligned with positions 1263 to 1273 of the amino acid sequence of SEQ ID NO: 3 and encompasses a mutation by insertion, substitution, or deletion of all or part of the amino acid residues of the ERRS signal encompassing the KXHXX motif of SEQ ID NO: 149, and wherein said mutation by insertion, substitution, or deletion at least impairs the retrieval of the polypeptide in the Endoplasmic Reticulum (ER), in particular a dual domain S protein of SARS-CoV-2 comprising a mutation by insertion, substitution, or deletion of all or part of the amino acid residues from position 1263 to position 1273 of the amino acid sequence of SEQ ID NO: 3, with the proviso that at least two amino acid residues of a KLHYT motif of SEQ ID NO: 150 from position 1269 to position 1273 of the amino acid sequence of SEQ ID NO: 3 are mutated by substitution or that a KLHYT motif of SEQ ID NO: 150 from position 1269 to position 1273 of the amino acid sequence of SEQ ID NO: 3 is deleted, and
      [0305] optionally an additional mutation by substitution that maintains the expressed dual domain S protein in its prefusion conformation, or
   [0306] (b) an immunogenic fragment of the dual domain S protein in (a) or a mutated antigen thereof that has 1, 2, 3 or more amino acid substitution(s), insertion(s) and/or deletion(s), and wherein the first heterologous polynucleotide is positioned in an additional transcription unit located between the P gene and the M gene of the MV (ATU2) or in an additional transcription unit located downstream of the H gene of the MV (ATU3), preferably in ATU2.

[0307] In a particular embodiment of the invention, the dual domain S protein of SARS-CoV-2 antigenic polypeptide further comprises a mutation selected from the group consisting of a deletion of the amino acid residues at positions 69 and 70 of the amino acid sequence of SEQ ID NO: 3, a deletion of the amino acid residues at positions 144 and 145 of the amino acid sequence of SEQ ID NO: 3, a mutation by substitution of the tyrosine residue at position 501 of the amino acid sequence of SEQ ID NO: 3 (N501Y), a mutation by substitution of the aspartic acid residue at position 570 of the amino acid sequence of SEQ ID NO: 3 (A570D), a mutation by substitution of the histidine residue at position 681 of the amino acid sequence of SEQ ID NO: 3 (P681H), a mutation by substitution of the isoleucine residue at position 716 of the amino acid sequence of SEQ ID NO: 3 (T7161), a mutation by substitution of the alanine residue at position 982 of the amino acid sequence of SEQ ID NO: 3 (S982A), a mutation by substitution of the histidine residue at position 1118 of the amino acid sequence of SEQ ID NO: 3 (D1118H), a mutation by substitution of the lysine residue at position 484 of the amino acid sequence of SEQ ID NO: 3 (E484K), a mutation by substitution of the asparagine residue at position 417 of the amino acid sequence of SEQ ID NO: 3 (K417N), a mutation by substitution of the threonine residue at position 417 of the amino acid sequence of SEQ ID NO: 3 (K417T) and a mutation by substitution of the glycine residue at position 614 of the amino acid sequence of SEQ ID NO: 3 (D614G), in particular a mutation selected from the group consisting of a mutation by substitution of the tyrosine residue at position 501 of the amino acid sequence of SEQ ID NO: 3 (N501Y), a mutation by substitution of the lysine residue at position 484 of the amino acid sequence of SEQ ID NO: 3 (E484K), a mutation by substitution of the asparagine residue at position 417 of the amino acid sequence of SEQ ID NO: 3 (K417N) and a mutation by substitution of the threonine residue at position 417 of the amino acid sequence of SEQ ID NO: 3 (K417T).

[0308] In some embodiments, the dual domain S protein of SARS-CoV-2 antigenic polypeptide further comprises a deletion of the amino acid residues at positions 69 and 70 of the amino acid sequence of SEQ ID NO: 3. In some embodiments, the dual domain S protein of SARS-CoV-2 antigenic polypeptide further comprises a deletion of the amino acid residues at positions 144 and 145 of the amino acid sequence of SEQ ID NO: 3. In some embodiments, the dual domain S protein of SARS-CoV-2 antigenic polypeptide further comprises the amino acid mutation N501Y of SEQ ID NO: 3. In some embodiments, the dual domain S protein of SARS-CoV-2 antigenic polypeptide further comprises the amino acid mutation A570D of SEQ ID NO: 3. In some embodiments, the dual domain S protein of SARS-CoV-2 antigenic polypeptide further comprises the amino acid mutation P681H of SEQ ID NO: 3. In some embodiments, the dual domain S protein of SARS-CoV-2 antigenic polypeptide further comprises the amino acid mutation T7161 of SEQ ID NO: 3. In some embodiments, the dual domain S protein of SARS-CoV-2 antigenic polypeptide further comprises the amino acid mutation S982A of SEQ ID NO: 3. In some embodiments, the dual domain S protein of SARS-CoV-2 antigenic polypeptide further comprises the amino acid mutation D1118H of SEQ ID NO: 3. In some embodiments, the dual domain S protein of SARS-CoV-2 antigenic polypeptide further comprises the amino acid mutation E484K of SEQ ID NO: 3. In some embodiments, the dual domain S protein of SARS-CoV-2 antigenic polypeptide further comprises the amino acid mutation K417N of SEQ ID NO: 3. In some embodiments, the dual domain S protein of SARS-CoV-2 antigenic polypeptide further comprises the amino acid mutation K417T of SEQ ID NO: 3. In some embodiments, the dual domain S protein of SARS-CoV-2 antigenic polypeptide further comprises the amino acid mutation D614G of SEQ ID NO: 3.

[0309] In a particular embodiment of the mutation by insertion, substitution, or deletion in the cytoplasmic tail of the S protein, all the amino acid residues of the ERRS signal encompassing the KXHXX motif of SEQ ID NO: 149 are substituted or deleted.

[0310] In another particular embodiment of the mutation by insertion, substitution, or deletion in the cytoplasmic tail of the S protein, part of the amino acid residues of the ERRS signal encompassing the KXHXX motif of SEQ ID NO: 149 are substituted or deleted.

[0311] In a particular embodiment of the invention, the mutation by insertion, substitution, or deletion in the cytoplasmic tail of the S protein encompasses a mutation by insertion, substitution, or deletion of all or part of the amino acid residues of the ERRS signal encompassing the KXHXX motif of SEQ ID NO: 149 and a mutation by insertion, substitution, or deletion of 1, 2, 3, 4, 5 or 6 amino acid residue(s), the mutation occurring in the 11 amino acid residues sequence of the S protein that may be aligned with positions 1263 to 1273 of the amino acid sequence of SEQ ID NO: 3.

[0312] Preferably, the first heterologous polynucleotide encodes a dual domain S protein of SARS-CoV-2 comprising a mutation by substitution of two alanine residues at positions 1269 and 1271 of the amino acid sequence of SEQ ID NO: 3, or a deletion of the amino acid residues from position 1269 to position 1273 of the amino acid sequence of SEQ ID NO: 3, or a deletion of the amino acid residues from position 1263 to position 1273 of the amino acid sequence of SEQ ID NO: 3.

[0313] Even more preferably, the first heterologous polynucleotide encodes (a) a prefusion-stabilized SF-2P-dER polypeptide of SARS-CoV-2 comprising a mutation by substitution of two proline residues at positions 986 and 987 of the amino acid sequence of SEQ ID NO: 3 and a deletion of its 11 C-terminal amino acid residues from position 1263 to position 1273 of the amino acid sequence of SEQ ID NO: 3, or (b) a prefusion-stabilized SF-2P-2a polypeptide of SARS-CoV-2 comprising a mutation by substitution of two proline residues at positions 986 and 987 of the amino acid sequence of SEQ ID NO: 3 and a mutation by substitution of two alanine residues at positions 1269 and 1271 of the amino acid sequence of SEQ ID NO: 3. In a particular embodiment, the first heterologous polynucleotide is positioned in an ATU2 located between the P gene and the M gene of the MV or in an ATU3 located downstream of the H gene of the MV. Preferably, the first heterologous polynucleotide is positioned in an ATU2 located between the P gene and the M gene of the MV. A nucleic acid construct according to the invention is a purified DNA molecule, obtained or obtainable by recombination of various polynucleotides of different origins, operably linked together. A nucleic acid construct may include a cDNA molecule encoding a full length antigenomic (+) RNA strand of a measles virus (MV).

[0314] In a particular embodiment of the invention, the nucleic acid construct further comprises a second heterologous polynucleotide encoding at least one polypeptide, an immunogenic fragment thereof (including a wild type or a mutated fragment) or a mutated antigen thereof that has 1, 2, 3 or more amino acid substitution(s), insertion(s) and/or deletion(s), of a coronavirus, in particular of coronavirus SARS-CoV-2, wherein the polypeptide is different from at least one polypeptide encoded by the first heterologous polynucleotide or the polypeptide encoded by the first heterologous polynucleotide and in particular is selected from the group consisting of the nucleocapsid (N) polypeptide, the matrix (M), the E polypeptide, the ORF8 polypeptide, the ORF7a polypeptide and the ORF3a polypeptide, or immunogenic fragments thereof or mutated fragments thereof or a mutated antigen thereof that has 1, 2, 3 or more amino acid substitution(s), insertion(s) and/or deletion(s), the second heterologous polynucleotide being positioned within an ATU at a location distinct from the location of the first heterologous polynucleotide.

[0315] In a particular embodiment of the invention, the nucleic acid construct further comprises a second heterologous polynucleotide encoding at least one polypeptide, an immunogenic fragment thereof or an antigenic fragment thereof (including a wild type or a mutated fragment) or a mutated antigen thereof that has 1, 2, 3 or more amino acid substitution(s), insertion(s) and/or deletion(s), of a coronavirus, in particular of SARS-CoV-2, wherein the polypeptide is different from at least one polypeptide encoded by the first heterologous polynucleotide and in particular is selected from the group consisting of the nucleocapsid (N) polypeptide, the matrix (M), the E polypeptide, the ORF8 polypeptide, the ORF7a polypeptide and the ORF3a polypeptide, or immunogenic fragments thereof or mutated fragments thereof or a mutated antigen thereof that has 1, 2, 3 or more amino acid substitution(s), insertion(s) and/or deletion(s), the second heterologous polynucleotide being positioned within an additional transcription unit (ATU) at a location distinct from the ATU of the first heterologous polynucleotide, in particular within an additional transcriptional unit upstream of the N gene of the MV (ATU1), or in particular within ATU2 or in particular within ATU3.

[0316] The ATU for cloning of the second heterologous polynucleotide is located at a different location with respect to the ATU used for cloning the first heterologous polynucleotide, in particular is located upstream of the N gene of the MV in the ATU1, or in particular within an ATU at a location between the P gene and the M gene of the MV in the ATU2 or in particular within an ATU at a location downstream of the H gene of the MV in the ATU3.

[0317] In a further aspect the invention concerns a nucleic acid construct comprising:
[0318] (1) a cDNA molecule encoding a full length, infectious antigenomic (+) RNA strand of a measles virus (MV); and
[0319] (2) a heterologous polynucleotide encoding at least one polypeptide of a coronavirus (CoV), in particular of SARS-CoV-2, selected from the group consisting of the nucleocapsid (N) polypeptide, the matrix (M), the E polypeptide, the ORF8 polypeptide, the ORF7a polypeptide and the ORF3a polypeptide, or immunogenic or antigenic fragments thereof or mutated fragments thereof or mutated antigens thereof that have 1, 2, 3 or more amino acid substitution(s), insertion(s) and/or deletion(s), the second heterologous polynucleotide being positioned within an ATU.

[0320] Additional transcriptional unit (ATU) sequences, especially ATU1, ATU2, ATU3 used for the invention, are sequences in the cDNA of the MV that are used for cloning heterologous polynucleotides into the cDNA of MV. ATU sequences comprise cis-acting sequences necessary for MV-dependent expression of a transgene, such as a promoter of the gene preceding, the insert represented by the polynucleotide, e.g., the first or the second polynucleotide encoding at least one polypeptide of a coronavirus, in particular encoding the spike (S) polypeptide of a coronavirus (CoV), in particular of SARS-CoV-2, or an immunogenic fragment t thereof that has 1, 2, 3 or more amino acid substitution(s), insertion(s) and/or deletion(s), or in particular encoding the nucleocapsid (N) polypeptide, the matrix (M), the E polypeptide, the ORF8 polypeptide, the ORF7a polypeptide or the ORF3a polypeptide, or immunogenic fragments thereof or mutated fragments thereof or a mutated antigen thereof that have 1, 2, 3 or more amino acid substitution(s), insertion(s) and/or deletion(s) and a multiple cloning sites cassette for insertion of said polynucleotide. In addition to the intergenic sequence of the genes (including Gene Start (GS) promoting the transcription and Gene End (GE) of the P gene of MV terminating the transcription of the insert (heterologous polynucleotide)), an ATU comprises a polylinker sequence for the insertion of the heterologous polynucleotide. ATU sequences are illustrated in the constructs of the invention.

[0321] When used to carry out the invention, the ATU is advantageously located within the N-terminal sequence of the cDNA molecule encoding the full-length (+)RNA strand of the antigenome of the MV and is especially located upstream from the N gene (ATU1) or between the P and M genes of this virus (ATU2) or between the H and L genes (ATU3). It has been observed that the transcription of the viral RNA of MV follows a gradient from the 5′ to the 3′ end. Thus, an ATU inserted in the 5′ end of the coding sequence of the cDNA will enable a greater expression of the heterologous DNA sequence within the ATU than an ATU inserted closer to the 3′ end of the coding sequence of the cDNA. An exemplary ATU may comprise the polynucleotide encoding at least one polypeptide such as a spike (S) polypeptide of a coronavirus (CoV), in particular of SARS-CoV-2, or an immunogenic fragment thereof that has 1, 2, 3 or more amino acid substitution(s), insertion(s) and/or deletion(s)) that it contains.

[0322] The polynucleotide encoding at least the spike (S) polypeptide of a coronavirus (CoV), in particular of SARS-CoV-2, or an immunogenic fragment thereof that has 1, 2, 3 or more amino acid substitution(s), insertion(s) and/or deletion(s), may thus be inserted in any intergenic region of the cDNA molecule of the MV, in particular in an ATU. Particular constructs of the invention are those illustrated in the examples.

[0323] In a preferred embodiment of the invention, the polynucleotide encoding at least the spike (S) polypeptide of a CoV, in particular of SARS-CoV-2, or an immunogenic fragment thereof that has 1, 2, 3 or more amino acid substitution(s), insertion(s) and/or deletion(s), is inserted in the intergenic region between the P and M genes of the MV cDNA molecule (ATU2), or between the H and L genes of the MV cDNA molecule (ATU3), preferably in an ATU3.

[0324] In a particular embodiment of the invention, the construct is prepared by cloning a polynucleotide encoding at least one polypeptide in particular the spike (S) E, N, ORF3a, ORF8, ORF7a or M polypeptide of a coronavirus (CoV), in particular of SARS-CoV-2 (such as a S polypeptide having the sequence disclosed in Genbank MN908947.3 or any of the polypeptides derived from the native S antigens and illustrated herein, especially as fragments of S or modified fragments of S), or an immunogenic fragment thereof (including a mutated fragment) as disclosed herein or a mutated antigen thereof that has 1, 2, 3 or more amino acid substitution(s), insertion(s) and/or deletion(s), in the cDNA encoding a full-length, antigenomic (+) RNA strand of a MV.

[0325] Alternatively, a nucleic acid construct of the invention may be prepared using steps of synthesis of nucleic acid fragments or polymerization from a template, including by PCR.

[0326] The nucleic acid construct of the invention and the MV-CoV of the invention encodes or expresses at least one polypeptide selected from the group consisting of S, E, N, ORF3a, ORF8, ORF7a or M proteins of a coronavirus or specifically described for the SARS-CoV-2 strain, in particular the spike (S) polypeptide of a coronavirus (CoV), in particular of SARS-CoV-2, or an immunogenic fragment thereof that has 1, 2, 3 or more amino acid substitution(s), insertion(s) or deletion(s).

[0327] According to a preferred embodiment, the invention also concerns modifications and optimization of the polynucleotide to allow an efficient expression of the at least one polypeptide selected from the group consisting of S, E, N, ORF3a, ORF8, ORF7a or M proteins of a coronavirus or specifically described for the SARS-CoV-2 strain, in particular a spike (S) polypeptide of a coronavirus (CoV), in particular of SARS-CoV-2, or an immunogenic fragment thereof that has 1, 2, 3 or more amino acid substitution(s), insertion(s) and/or deletion(s), at the surface of chimeric infectious particles of MV-CoV in the host, in particular the human host.

[0328] According to this embodiment, optimization of the polynucleotide sequence can be operated avoiding cis-active domains of nucleic acid molecules, including: internal TATA-boxes, chi-sites and ribosomal entry sites; AT-rich or GC-rich sequence stretches; AU-rich sequence elements (ARE), inhibitory sequence elements (INS), and cis-acting repressor (CRS) sequence elements; repeat sequences and RNA secondary structures; cryptic splice donor and acceptor sites, and branch points.

[0329] The optimized polynucleotides may also be codon optimized for expression in a specific cell type. This optimization allows increasing the efficiency of chimeric infectious particles production in cells without impacting the expressed protein(s).

[0330] In a particular embodiment of the invention, the polynucleotide encoding at least a spike (S) polypeptide of a coronavirus (CoV), in particular of SARS-CoV-2, or an immunogenic fragment thereof that has 1, 2, 3 or more amino acid substitution(s), insertion(s) and/or deletion(s), has been codon optimized for use in humans.

[0331] The optimization of the polynucleotide encoding at least a spike (S) polypeptide of a coronavirus (CoV), in particular of SARS-CoV-2, or an immunogenic fragment thereof, or a variant of the S polypeptide or fragment thereof that has 1, 2, 3 or more amino acid substitution(s), insertion(s) and/or deletion(s) may be performed by modification of the wobble position in codons without impacting the identity of the amino acid residue translated from the codon with respect to the original one.

[0332] Optimization is also performed to remove certain sequences from Measles virus that may result in transcript editing. The editing of Measles virus transcript occurs in particular in the transcript encoded by the P gene of Measles virus. This editing, by the insertion of extra G residues at a specific site within the P transcript, gives rise to a new protein truncated compared to the P protein. Addition of only a single G residue results in the expression of the V protein, which contains a unique carboxyl terminus (Cattaneo R et al., Cell. 1989 Mar. 10; 56(5):759-64).

[0333] In a particular embodiment of the invention, measles transcript editing sequences have been changed from the polynucleotide encoding a spike (S) polypeptide of a coronavirus (CoV), in particular of SARS-CoV-2, or an immunogenic fragment thereof that has 1, 2, 3 or more amino acid substitution(s), insertion(s) and/or deletion(s). The following measles transcript editing sequences can be mutated: AAAGGG, AAAAGG, GGGAAA, GGGGAA, TTAAA, AAAA, as well as their complementary sequence: TTCCCC, TTTCCC, CCTTTT, CCCCTT, TTTAA, TTTT. For example, AAAGGG can be mutated in AAAGGC, AAAAGG can be mutated in AGAAGG or in TAAAGG or in GAAAGG, and GGGAAA in GCGAAA.

[0334] In a particular embodiment of the invention, the native and codon-optimized nucleotide sequences of the polynucleotide encoding particular peptides/proteins/antigen as well as the amino acid sequences of these peptides/proteins/antigen of the invention are selected from the sequences disclosed as SEQ ID NOs: 1-49, 51-66 and 73-82. See Tables 1 and 3 below for additional information regarding many of these sequences.

[0335] Codon-optimized genes are useful both to promote high-level expression of poorly transcribed/translated genes and to recover Measles-based vaccine candidates with high and stable antigen expression. However, they suffer from major drawbacks, which are intrinsically linked to their design and final codon (most used codons in the final host genome) and nucleotide (high GC/AT ratio) compositions. Thus codon-optimized genes most often promote high level translation that, if highly transcribed, leads to saturation of the translational and post-translational cellular machineries and associated consequences on the quality of the expressed protein and on the cells itself (ER and Golgi stress). Their naturally high GC/composition (usually more than 55-60%) is also certainly not optimal for engineering of stable recombinant MV vectors since the GC composition of the MV genome is much lower (47.4%). The inventors thus decided to engineer optimized genes for the MV platform with the following features in the polynucleotides encoding the polypeptide(s) of a coronavirus, in particular of SARS-CoV-2, specifically:
[0336] absence of MV editing (AnGn, n≥3)- and core gene end (A4CKT)-like sequences on both strands,
[0337] removal, where applicable, of internal TATA-boxes, chi-sites and ribosomal entry sites (for translation efficiency),
[0338] removal, where applicable, of AT-rich or GC-rich sequence stretches, RNA instability motifs, repeat sequences and RNA secondary structures (for transcription efficiency, mRNA stability and also translation efficiency), and/or
[0339] balanced codon composition, avoiding, where applicable, rare codons and high usage of the most frequent codons (for efficiency, accuracy and speed of translation without saturation of the translation machinery),
[0340] target GC composition of 44-50% (to adjust to that of MV genome).

[0341] In addition, a criteria was added for the removal of cryptic splice donor and acceptor sites in higher eukaryotes, which is of no importance for the MV platform but allows monitoring for the synthetic gene expression by transient transfection in mammalian cells.

[0342] BsiWI and BssHII restriction sites were added at the 5′ and 3′ ends, respectively, of the designed nucleotide sequences and appropriate spacer sequence were inserted so that the resulting cDNAs comply with the “rule of six”, which stipulates that the number of nucleotides of the MV genome must be a multiple of 6.

[0343] The resulting cDNAs were named S_MV optimized synthetic gene and N_MV optimized synthetic gene is herein disclosed as SEQ ID NO: 36 and SEQ ID NO: 37 respectively.

[0344] In a particular embodiment of the invention, the transfer vector plasmid has the optimized sequence of SEQ ID NO: 34 (pKM-ATU2-S_2019-nCoV (i.e. SARS-CoV-2)) or SEQ ID NO: 35 (pKM-ATU3-S_2019-nCoV (i.e. SARS-CoV-2)), as mentioned in Table 1 below.

[0345] In a particular embodiment of the invention, the transfer vector plasmid has the optimized sequence selected from the group consisting of SEQ ID NO: 144 (pTM2-SF-dER_SARS-CoV-2), SEQ ID NO: 145 (pTM2-S2-dER_SARS-CoV-2), SEQ ID NO: 146 (pTM2-SF-2P-dER_SARS-CoV-2), SEQ ID NO: 147 (pTM2-S2-2P-dER_SARS-CoV-2) and SEQ ID NO: 148 (pTM2-SF-2P-2a_SARS-CoV-2), preferably has the sequence of SEQ ID NO: 146 (pTM2-SF-2P-dER_SARS-CoV-2) or SEQ ID NO: 148 (pTM2-SF-2P-2a_SARS-CoV-2), even more preferably has the sequence of SEQ ID NO: 146 (pTM2-SF-2P-dER_SARS-CoV-2).

[0346] In a particular embodiment of the invention, insertion of the nucleic acid construct as defined herein within the transfer vector plasmid can lead to mutations, in particular silent mutation(s).

[0347] In a particular embodiment of the invention, the first heterologous polynucleotide encodes the wild type S polypeptide of SEQ ID NO: 3, or a fragment thereof. The fragment thereof may include the S1 domain of SEQ ID NO: 11 or the S2 domain of SEQ ID NO: 13 of the S polypeptide, preferably the wild type S polypeptide of SEQ ID NO: 3, or a mutated antigen thereof that has 1, 2, 3 or more amino acid residue substitution(s) or insertion(s) and/or deletion(s), in particular less than 10, or less than 5 amino acid residue substitutions. The substitutions may be designed to improve stability.

[0348] In a particular embodiment of the invention, the first heterologous polynucleotide encodes the wild type S polypeptide of SEQ ID NO: 3, or an immunogenic fragment thereof. The immunogenic fragment thereof may include the S1 domain of SEQ ID NO: 11 or the S2 domain of SEQ ID NO: 13 of the S polypeptide, preferably the wild type S polypeptide of SEQ ID NO: 3, or a mutated antigen thereof that has 1, 2, 3 or more amino acid residue substitution(s) or insertion(s) and/or deletion(s), in particular less than 10, or less than 5 amino acid residue substitutions especially a mutated antigen that has 1, 2, 3 or more amino acid residue substitution(s), in particular less than 10, or less than 5 amino acid residue substitutions and that has up to 11 amino acid residue deletion in the cytoplasmic tail as disclosed herein. The substitutions may in particular be designed to improve stability. The deletion may be designed to improve surface expression of the polypeptide in cells. According to a particular embodiment, the first heterologous polynucleotide encodes a polypeptide of the amino acid sequences selected from the group consisting of SEQ ID NOs: 5, 7, 9, 15, 17 and 19, in particular SEQ ID NO: 5. According to a preferred embodiment, the first heterologous polynucleotide encodes the SF-2P-dER polypeptide of SEQ ID NO: 76, or the SF-2P-2a polypeptide of SEQ ID NO: 82, preferably the SF-2P-dER polypeptide of SEQ ID NO: 76, or a mutated antigen thereof that has 1, 2, 3 or more amino acid residue substitution(s) or insertion(s) and/or deletion(s), in particular less than 10, or less than 5 amino acid residue substitutions or additions and/or deletions.

[0349] According to a particular embodiment, the first heterologous polynucleotide encodes a mutated antigen having an amino acid sequence selected from the group consisting of SEQ ID NOs: 5, 7, 9, 15, 17, 19, 43, 45, 47, 49, 52, 54, 56, 58, 60, 62 and 65, in particular SEQ ID NOs: 5, 43, 45, 47 and 49, preferably SEQ ID NOs: 43, 45, 47 and 49, more preferably SEQ ID NOs: 45, 47 and 49, even more preferably SEQ ID NO: 47 or SEQ ID NO: 49, and even more preferably SEQ ID NO: 49.

[0350] In a particular embodiment of the invention, a single polypeptide of a coronavirus, in particular of SARS-CoV-2, is encoded by the nucleic acid construct and the polypeptide is the S polypeptide or a portion or fragment thereof as described herein.

[0351] In a particular embodiment of the nucleic acid construct of the invention, the second heterologous polynucleotide encodes (i) the N polypeptide of SEQ ID NO: 22, an immunogenic fragment thereof or a mutated antigen of the N polypeptide that has 1, 2, 3 or more amino acid residue substitution(s) or insertion(s) and/or deletion(s), in particular less than 10, or less than amino acid residue substitutions or additions or deletions, and/or (ii) the M polypeptide of SEQ ID NO: 24 or its endodomain, (iii) the E polypeptide of SEQ ID NO: 23, (iv) the ORF8 polypeptide of SEQ ID NO: 25, (v) the ORF7a polypeptide of SEQ ID NO: 27 and/or (vi) the ORF3a polypeptide of SEQ ID NO: 26 of a coronavirus, in particular of SARS-CoV-2, an immunogenic fragment thereof or an antigenic fragment thereof, or a mutated antigen thereof that has 1, 2, 3 or more amino acid residue substitution(s) or insertion(s) and/or deletion(s), in particular less than 10, or less than 5 amino acid residue substitutions or additions and/or deletions. In a preferred embodiment of the invention, the heterologous polynucleotide encoding the N polypeptide has the sequence of SEQ ID NO: 20, 21 or 37, preferably the sequence of SEQ ID NO: 21 or SEQ ID NO: 37.

[0352] In a preferred embodiment of the invention, the heterologous polynucleotide encoding the S polypeptide, S1 polypeptide or S2 polypeptide, an immunogenic fragment thereof that has 1, 2, 3 or more amino acid substitution(s), insertion(s) and/or deletion(s) comprises or consists in the open reading frame of the wild type gene or has a codon-optimized open reading frame(s) (coORF) for expression in mammalian cells and/or in Drosophila cells, in particular, the heterologous polynucleotide comprises one of the following sequences:
[0353] SEQ ID NO: 1 or 2 or 36 which encodes the S polypeptide, preferably SEQ ID NO: 2 or,
[0354] SEQ ID NO: 10 which encodes the S1 polypeptide or,
[0355] SEQ ID NO: 12 which encodes the S2 polypeptide or,
[0356] SEQ ID NO: 4 which encodes the stab-S polypeptide (also named S2P polypeptide) or,
[0357] SEQ ID NO: 6 which encodes the Secto polypeptide or,
[0358] SEQ ID NO: 8 which encodes the stab-Secto polypeptide or,
[0359] SEQ ID NO:14 which encodes the stab-S2 polypeptide or,
[0360] SEQ ID NO: 16 which encodes the tri-Secto polypeptide or,
[0361] SEQ ID NO: 18 which encodes the tristab-Secto polypeptide or
[0362] SEQ ID NO: 42 which encodes the S3F polypeptide or,
[0363] SEQ ID NO: 44 which encodes the S2P3F polypeptide or,
[0364] SEQ ID NO: 46 which encodes the S2PΔF polypeptide or,
[0365] SEQ ID NO: 48 which encodes the S2PΔF2A polypeptide or,
[0366] SEQ ID NO: 51 which encodes the T4-S2P3F polypeptide (also named tristab-Secto-3F) or,
[0367] SEQ ID NO: 53 which encodes the S6P polypeptide or,
[0368] SEQ ID NO: 55 which encodes the S6P3F polypeptide or,
[0369] SEQ ID NO: 57 which encodes the S6PΔF polypeptide or,
[0370] SEQ ID NO: 59 which encodes the SCCPP polypeptide or,
[0371] SEQ ID NO: 61 which encodes the SCC6P polypeptide or,
[0372] SEQ ID NO: 63 which encodes the SMVopt2P polypeptide or,
[0373] SEQ ID NO: 64 which encodes the SMVoptΔF polypeptide or,
[0374] SEQ ID NO: 66 which encodes the SMVopt2PΔF polypeptide, preferably the heterologous polynucleotide comprises the sequence selected from the group consisting of SEQ ID NO: 2, SEQ ID NO: 4, SEQ ID NO: 42, SEQ ID NO: 44, SEQ ID NO: 46 and SEQ ID NO: 48, more preferably the heterologous polynucleotide comprises the sequence of SEQ ID NO: 48 which encodes the S2PΔF2A polypeptide.

[0375] In a particular embodiment of the invention, the nucleic acid construct is a cDNA construct comprising from 5′ to 3′ end the following polynucleotides coding for ORFs:
[0376] (a) a polynucleotide encoding the N protein of the MV;
[0377] (b) a polynucleotide encoding the P protein of the MV;
[0378] (c) the first heterologous polynucleotide encoding an S polypeptide, an immunogenic fragment thereof that has 1, 2, 3 or more amino acid substitution(s), insertion(s) and/or deletion(s), of a coronavirus, in particular of SARS-CoV-2, and wherein the first heterologous polynucleotide is positioned within an additional transcription unit (ATU) inserted within the cDNA of the antigenomic (+) RNA, in particular within ATU2 or ATU3, preferably ATU3;
[0379] (d) a polynucleotide encoding the M protein of the MV;
[0380] (e) a polynucleotide encoding the F protein of the MV;
[0381] (f) a polynucleotide encoding the H protein of the MV;
[0382] (g) a polynucleotide encoding the L protein of the MV; and

[0383] wherein the polynucleotides are operatively linked within the nucleic acid construct and are under the control of a viral replication and transcriptional regulatory elements such as MV leader and trailer sequences and are framed by a T7 promoter and a T7 terminator and additionally are framed by restrictions sites suitable for cloning in a vector to provide a recombinant MV-CoV expression cassette.

[0384] In a preferred embodiment of the invention, the nucleic acid construct is a cDNA construct comprising from 5′ to 3′ end the following polynucleotides coding for open reading frames:
[0385] (a) a polynucleotide encoding the N protein of the MV;
[0386] (b) a polynucleotide encoding the P protein of the MV;
[0387] (c) the first heterologous polynucleotide as defined above;
[0388] (d) a polynucleotide encoding the M protein of the MV;
[0389] (e) a polynucleotide encoding the F protein of the MV;
[0390] (f) a polynucleotide encoding the H protein of the MV;
[0391] (g) a polynucleotide encoding the L protein of the MV; and

[0392] wherein the polynucleotides are operatively linked within the nucleic acid construct and are under the control of a viral replication and transcriptional regulatory elements such as MV leader and trailer sequences and are framed by a T7 promoter and a T7 terminator and are framed by restriction sites suitable for cloning in a vector to provide a recombinant MV-CoV expression cassette. In a more preferred embodiment of the nucleic acid construct of the invention, (i) the first heterologous polynucleotide comprises a measles virus-optimized nucleotide sequence, in particular a sequence selected from the group consisting of SEQ ID NO: 36, SEQ ID NO: 63, SEQ ID NO: 64 and SEQ ID NO: 66, and is positioned within ATU2, or (ii) the first heterologous polynucleotide comprises a codon-optimized nucleotide sequence, in particular a sequence selected from the group consisting of SEQ ID NO: 2, SEQ ID NO: 4, SEQ ID NO: 44, SEQ ID NO: 46, SEQ ID NO: 48, SEQ ID NO: 51, SEQ ID NO: 53, SEQ ID NO: 55, SEQ ID NO: 57, SEQ ID NO: 59 and SEQ ID NO: 61, and is positioned within ATU3.

[0393] In a more preferred embodiment of the nucleic acid construct of the invention, (i) the first heterologous polynucleotide is positioned within ATU3 and the second heterologous polynucleotide, in particular the second heterologous polynucleotide encoding the N polypeptide, is positioned within ATU2, or (ii) the first heterologous polynucleotide is positioned within ATU2 and the second heterologous polynucleotide, in particular the second heterologous polynucleotide encoding the N polypeptide, is positioned within ATU3.

[0394] In another embodiment the first heterologous polynucleotide is replaced by the second heterologous polynucleotide.

[0395] In another aspect of the invention, the nucleic acid construct comprises only one heterologous polynucleotide such as the so-called second heterologous polynucleotide as defined herein, positioned within ATU2 or ATU3. In some embodiments, this second heterologous polynucleotide encodes the N polypeptide. In some embodiments, this second heterologous polynucleotide encoding the N polypeptide has the sequence of SEQ ID NO: 20, 21 or 37, preferably the sequence of SEQ ID NO: 21 or SEQ ID NO: 37. This nucleic acid construct may further comprise another heterologous polynucleotide, for example the so-called first heterologous polynucleotide as defined herein. All the definitions and embodiments disclosed herein apply to this other aspect of the invention and all paragraphs can be combined together.

[0396] In a preferred embodiment of the invention, the heterologous polynucleotide encoding the S polypeptide, S1 polypeptide or S2 polypeptide, an immunogenic fragment thereof that has 1, 2, 3 or more amino acid substitution(s), insertion(s) and/or deletion(s) comprises or consists in the open reading frame of the wild type gene or has a codon-optimized open reading frame(s) (coORF) for expression in mammalian cells and/or in Drosophila cells, in particular, the heterologous polynucleotide comprises one of the following sequences:
[0397] SEQ ID NO: 1 or 2 or 36 which encodes the S polypeptide, preferably SEQ ID NO: 2 or,
[0398] SEQ ID NO: 10 which encodes the S1 polypeptide or,
[0399] SEQ ID NO: 12 which encodes the S2 polypeptide or,
[0400] SEQ ID NO: 4 which encodes the stab-S polypeptide (also named S2P polypeptide) or,
[0401] SEQ ID NO: 6 which encodes the Secto polypeptide or,
[0402] SEQ ID NO: 8 which encodes the stab-Secto polypeptide or,
[0403] SEQ ID NO:14 which encodes the stab-S2 polypeptide or,
[0404] SEQ ID NO: 16 which encodes the tri-Secto polypeptide or,
[0405] SEQ ID NO: 18 which encodes the tristab-Secto polypeptide, preferably the heterologous polynucleotide comprises the sequence of SEQ ID NO: 2 or SEQ ID NO: 4.

[0406] In an even more preferred embodiment of the invention, the heterologous polynucleotide encoding the SF-2P-dER polypeptide or SF-2P-2a polypeptide, an immunogenic fragment thereof that has 1, 2, 3 or more amino acid substitution(s), insertion(s) and/or deletion(s) has the open reading frame of a codon-optimized open reading frame(s) (coORF) for expression in mammalian cells and/or in drosophila cells, in particular, the heterologous polynucleotide comprises one of the following sequences:
[0407] i. SEQ ID NO: 75 which encodes the SF-2P-dER polypeptide or,
[0408] ii. SEQ ID NO: 81 which encodes the SF-2P-2a polypeptide, preferably the heterologous polynucleotide comprises the sequence of SEQ ID NO: 75 which encodes the SF-2P-dER polypeptide.

[0409] In a particular embodiment of the invention, the nucleic acid construct is a cDNA construct comprising from 5′ to 3′ end the following polynucleotides coding for ORFs:
[0410] (a) a polynucleotide encoding the N protein of the MV;
[0411] (b) a polynucleotide encoding the P protein of the MV;
[0412] (c) the first heterologous polynucleotide encoding at least an S polypeptide, an immunogenic fragment thereof that has 1, 2, 3 or more amino acid substitution(s), insertion(s) and/or deletion(s), of a coronavirus, in particular of SARS-CoV-2, and wherein the first heterologous polynucleotide is positioned within an additional transcription unit (ATU) inserted within the cDNA of the antigenomic (+) RNA, in particular within ATU2 or ATU3, preferably ATU2;
[0413] (d) a polynucleotide encoding the M protein of the MV;
[0414] (e) a polynucleotide encoding the F protein of the MV;
[0415] (f) a polynucleotide encoding the H protein of the MV;
[0416] (g) a polynucleotide encoding the L protein of the MV; and

[0417] wherein the polynucleotides are operatively linked within the nucleic acid construct and are under the control of a viral replication and transcriptional regulatory elements such as MV leader and trailer sequences and are framed by a T7 promoter and a T7 terminator and additionally are framed by restriction sites suitable for cloning in a vector to provide a recombinant MV-CoV expression cassette.

[0418] In a preferred embodiment of the invention, the nucleic acid construct is a cDNA construct comprising from 5′- to 3′-end the following polynucleotides coding for open reading frames:
[0419] (a) a polynucleotide encoding the N protein of the MV;
[0420] (b) a polynucleotide encoding the P protein of the MV;
[0421] (c) the first heterologous polynucleotide according to the invention, in particular the first heterologous polynucleotide encoding the SF-2P-dER or SF-2P-2a polypeptide, an immunogenic fragment thereof that has 1, 2, 3 or more amino acid substitution(s), insertion(s) and/or deletion(s), of SARS-CoV-2, and wherein the first heterologous polynucleotide is positioned within ATU2 or ATU3, preferably ATU2;
[0422] (d) a polynucleotide encoding the M protein of the MV;
[0423] (e) a polynucleotide encoding the F protein of the MV;
[0424] (f) a polynucleotide encoding the H protein of the MV;
[0425] (g) a polynucleotide encoding the L protein of the MV; and

[0426] wherein the polynucleotides are operatively linked within the nucleic acid construct and are under the control of a viral replication and transcriptional regulatory elements such as MV leader and trailer sequences and are framed by a T7 promoter and a T7 terminator and additionally are framed by restrictions sites suitable for cloning in a vector to provide a recombinant MV-CoV expression cassette.

[0427] In another embodiment the first nucleic acid construct is replaced by the second nucleic acid construct.

[0428] The expressions “N protein”, “P protein”, “M protein”, “F protein”, “H protein” and “L protein” refer respectively to the nucleoprotein (N), the phosphoprotein (P), the matrix protein (M), the fusion protein (F), the hemagglutinin protein (H) and the RNA polymerase large protein (L) of a MV Fields, Virology (Knipe & Howley, 2001).

[0429] In the construct of the invention the polynucleotide sequences disclosed herein in respect of MV sequences taken together with the added polynucleotide sequences that will remain in the replicon of the recombinant genome comply with the “rule of six” featuring the requirement that the MV genome be an exact multiple of six nucleotides in length for reverse genetics for correctly take place in order to enable efficient rescue.

[0430] In a particular embodiment of the invention, the sequence of the recombinant MV-CoV nucleic acid molecule between the first nucleotide of the cDNA encoding the MV antigenome and the last nucleotide of the cDNA encoding the MV antigenome is a multiple of 6 nucleotides.

[0431] The “rule of six” accordingly also applies to this construct prepared according to the invention that comprises the sequences encoding the coronavirus antigen(s).

[0432] The “rule of six” is expressed in the fact that the total number of nucleotides present in a nucleic acid representing the MV(+) strand RNA genome or in nucleic acid constructs comprising same is a multiple of six. The “rule of six” has been acknowledged in the state of the art as a requirement regarding the total number of nucleotides in the genome of the MV, which enables efficient or optimized replication of the MV genomic RNA. In the embodiments of the present invention defining a nucleic acid construct that meets the rule of six, the rule applies to the nucleic acid construct specifying the cDNA encoding the full-length MV (+) strand RNA genome and all inserted sequences, when taken individually or collectively.

[0433] In particular, the nucleic acid construct of the invention complies with the rule of six (6) of the MV genome when recombined with the polynucleotide encoding at least a spike (S) polypeptide of a coronavirus (CoV), in particular of SARS-CoV-2, or an immunogenic fragment thereof that has 1, 2, 3 or more amino acid substitution(s), insertion(s) and/or deletion(s), taken together with the cDNA molecule encoding the full-length, infectious antigenomic (+) RNA strand of the MV consist of a number of nucleotides that is a multiple of six. In a particular embodiment, the rule of six applies to the cDNA encoding the full-length infectious antigenomic (+) RNA strand of the MV and to the polynucleotide cloned into the cDNA and encoding at least a spike (S) polypeptide of a CoV, in particular of SARS-CoV-2, or an immunogenic fragment thereof that has 1, 2, 3 or more amino acid substitution(s), insertion(s) and/or deletion(s). Alternatively, compliance with the rule of six may be determined taking into account the whole construct or the transcript obtained from the construct in cells used for the rescue of recombinant measles virus.

[0434] The organization of the genome of MVs and their replication and transcription process have been fully identified in the prior art and are especially disclosed in Horikami S. M. and Moyer S. A. (Curr. Top. Microbiol. Immunol. (1995) 191, 35-50) or in Combredet C. et al (Journal of Virology, November 2003, p 11546-11554) for the Schwarz vaccination strain of the virus or for broadly considered negative-sense RNA viruses, in Neumann G. et al (Journal of General Virology (2002) 83, 2635-2662).

[0435] In a preferred embodiment of the invention, the measles virus is an attenuated virus strain.

[0436] An “attenuated strain” of measles virus is defined as a strain that is avirulent or less virulent than the parent strain in the same host, while maintaining immunogenicity and possibly adjuvanticity when administered in a host i.e., preserving immunodominant T and B cell epitopes and possibly the adjuvanticity such as the induction of T cell costimulatory proteins or the cytokine IL-12.

[0437] An attenuated strain of a MV accordingly refers to a strain which has been serially passaged on selected cells and, possibly, adapted to other cells to produce seed strains suitable for the preparation of vaccine strains, harboring a stable genome which would not allow reversion to pathogenicity nor integration in host chromosomes. As a particular “attenuated strain”, an approved strain for a vaccine is an attenuated strain suitable for the invention when it meets the criteria defined by the FDA (US Food and Drug Administration) i.e., it meets safety, efficacy, quality and reproducibility criteria, after rigorous reviews of laboratory and clinical data (www.fda.gov/cber/vaccine/vacappr.htm).

[0438] Particular attenuated strains that can be used to implement the present invention and especially to derive the MV cDNA of the nucleic acid construct are the Schwarz strain, the Zagreb strain, the AIK-C strain and the Moraten strain, more preferably the Schwarz strain. All these strains have been described in the prior art and access to them is provided in particular as commercial vaccines. In a particular embodiment of the invention, the recombinant DNA or cDNA of the MV-CoV molecule is placed under the control of heterologous expression control sequences. The insertion of such a control for the expression of the DNA/cDNA, is favorable when the expression of this DNA/cDNA is sought in cell types which do not enable full transcription of the DNA/cDNA with its native control sequences.

[0439] In a particular embodiment of the invention, the heterologous expression control sequence comprises the T7 promoter and T7 terminator sequences. These sequences are respectively located 5′ and 3′ of the coding sequence for the full length antigenomic (+)RNA strand of MV and from the adjacent sequences around this coding sequence. Accordingly in a particular embodiment the nucleic acid construct of the invention comprises these additional control sequences.

[0440] In a particular embodiment of the invention, the recombinant nucleic acid molecule or the nucleic acid construct encoding the antigenomic RNA of the measles virus recombined with the heterologous polynucleotide, which is defined herein is further modified i.e., comprises additional nucleotide sequences or motifs.

[0441] In a preferred embodiment, the nucleic acid construct or the recombinant nucleic acid molecule encoding the antigenomic RNA of the measles virus recombined with the heterologous polynucleotide according to the invention further comprises, (a) a GGG motif followed by a hammerhead ribozyme sequence at the 5′-end of the nucleic acid construct, adjacent to a first nucleotide of the nucleotide sequence encoding a full-length antigenomic (+)RNA strand of an attenuated MV vaccine strain, in particular of a Schwarz strain or of a Moraten strain, and also comprises, (b) a nucleotide sequence of a ribozyme in particular the sequence of the Hepatitis delta virus ribozyme (6), at the 3′-end of the recombinant MV-CoV nucleic acid molecule, adjacent to the last nucleotide of the nucleotide sequence encoding the full length anti-genomic (+)RNA strand. The Hepatitis delta virus ribozyme (6) is advantageously hence provided at the 3′-end, adjacent to the last nucleotide of the nucleotide sequence encoding the full length anti-genomic (+)RNA strand.

[0442] The GGG motif placed at the 5′ end, adjacent to the first nucleotide of the above coding sequence improves the efficiency of the transcription of the cDNA coding sequence. The proper assembly of measles virus particles requires that the cDNA encoding the antigenomic (+)RNA of the nucleic acid construct of the invention complies with the rule of six, such that when the GGG motif is added, a ribozyme is also added at the 5′ end of the coding sequence of the cDNA, 3′ from the GGG motif, thereby enabling cleavage of the transcript at the first coding nucleotide of the full-length antigenomic (+)RNA strand of MV.

[0443] In a particular embodiment of the invention, in order to prepare the nucleic acid construct of the invention, the preparation of a cDNA molecule encoding the full-length antigenomic (+) RNA of a MV disclosed in the prior art is achieved by known methods. The cDNA provides especially the genome vector when it is inserted in a vector such as a plasmid.

[0444] A particular cDNA molecule suitable for the preparation of the nucleic acid construct of the invention is the one obtained using the Schwarz strain of MV. Accordingly, the cDNA coding for the antigenome of the measles virus used within the present invention may be obtained as disclosed in WO2004/000876 or may be obtained from plasmid pTM-MVSchw deposited by Institut Pasteur at the Collection Nationale de Culture de Microorganismes (CNCM), 28 rue du Dr Roux, 75724 Paris Cedex 15, France, under No I-2889 on Jun. 12, 2002, the sequence of which is disclosed in WO2004/000876 incorporated herein by reference. The plasmid pTM-MVSchw was obtained from a Bluescript plasmid and comprises the polynucleotide coding for the full-length measles virus (+) RNA strand of the Schwarz strain placed under the control of the promoter of the T7 RNA polymerase. Plasmid pTM-MVSchw has 18967 nucleotides and the sequence of SEQ ID NO: 28. cDNA molecules (also designated cDNA of the measles virus or MV cDNA for convenience) from other MV strains may be similarly obtained starting from the nucleic acid purified from viral particles of attenuated MV such as those described herein.

[0445] The cDNA coding for the antigenome of the measles virus used within the present invention may also be obtained from plasmid pTM2-MVSchw-gfp deposited by Institut Pasteur at the Collection Nationale de Culture de Microorganismes (CNCM), 28 rue du Dr Roux, 75724 Paris Cedex 15, France, under No I-2890 on Jun. 12, 2002. It has 19795 nucleotides and a sequence represented as SEQ ID NO: 29. This plasmid contains the sequence encoding the eGFP marker that may be deleted.

[0446] The above cited pTM-MVSchw plasmids may also be used for the preparation of the nucleic acid constructs of the invention, by cloning the heterologous polynucleotide encoding a polypeptide derived from an antigen of a coronavirus, in particular of the SARS-CoV-2 strain, (in particular a polypeptide derived from the S antigen as disclosed herein) in the cDNA encoding the antigenome of the measles virus, using one or more ATU inserted at position known for insertion of ATU1 or ATU2 or ATU3, preferably ATU3.

[0447] In a particular embodiment, the nucleic acid construct of the invention comprises or consists of the recombinant MV-CoV nucleic acid molecule located from position 1 to position 20152 in the sequence of SEQ ID NO: 34 or SEQ ID NO: 35. This construct encodes the S polypeptide of SARS-CoV-2, respectively located in either the ATU2 or in the ATU3 inserted in the cDNA encoding the measles virus antigenome.

[0448] In a particular embodiment, the invention relates to a nucleic acid construct derived from the above by replacement of the sequence encoding the S protein by a polynucleotide encoding another polypeptide of a coronavirus, in particular of the SARS-CoV-2, such as the sequence of a fragment of the S antigen as disclosed herein, in particular a nucleotide sequence encoding one of the stab-S (also named S2P), Secto, stab-Secto, S1, S2, stab-S2, tri-Secto, tristab-Secto, S3F, S2P3F, S2PΔF, S2PΔF2A polypeptide, in particular a polynucleotide of sequence disclosed as SEQ ID NO: 4, 6, 8, 10, 12, 14, 16, 18, 42, 44, 46 or 48 respectively, preferably SEQ ID NO: 4, 42, 44, 46 or 48, more preferably SEQ ID NO: 44, 46 or 48, even more preferably SEQ ID NO: 46 or SEQ ID NO: 48, even more preferably SEQ ID NO: 48, or a polynucleotide encoding the amino acid sequence of SEQ ID NO: 5, 7, 9, 11, 13, 15, 17, 19, 43, 45, 47 or 49 respectively, preferably SEQ ID NO: 5, 43, 45, 47 or 49, more preferably SEQ ID NO: 45, 47 or 49, even more preferably SEQ ID NO: 47 or SEQ ID NO: 49, even more preferably SEQ ID NO: 49. In such embodiment, the polynucleotide region to be replaced in the sequence of SEQ ID NO: 34 is from position 3538 to position 7362 and the polynucleotide region to be replaced in the sequence of SEQ ID NO: 35 is from position 9340 to position 13164.

[0449] In a particular embodiment, the invention relates to a nucleic acid construct derived from the above by replacement of the sequence encoding the S protein by a polynucleotide encoding another polypeptide of a coronavirus, in particular of SARS-CoV-2, such as the sequence of a fragment of the S antigen as disclosed herein, in particular a nucleotide sequence encoding one of the stab-S (also named S2P), Secto, stab-Secto, S1, S2, stab-S2, tri-Secto, tristab-Secto, SF-2P-dER or SF-2P-2a polypeptide, in particular a polynucleotide of sequence disclosed as SEQ ID NO: 4, 6, 8, 10, 12, 14, 16, 18, 75 or 81 respectively, preferably SEQ ID NO: 4, 75 or 81, more preferably SEQ ID NO: 75 or 81, even more preferably SEQ ID NO: 75, or a polynucleotide encoding the amino acid sequence of SEQ ID NO: 5, 7, 9, 11, 13, 15, 17, 19, 76 or 82 respectively, preferably SEQ ID NO: 5, 76 or 82, more preferably SEQ ID NO: 76 or 82, even more preferably SEQ ID NO: 76. In such embodiment, the polynucleotide region to be replaced in the sequence of SEQ ID NO: 34 is from position 3538 to position 7362 and the polynucleotide region to be replaced in the sequence of SEQ ID NO: 35 is from position 9340 to position 13164.

[0450] In another embodiment the invention relates to a nucleic acid construct derived from the above by replacement of the sequence encoding the S protein by a polynucleotide encoding another polypeptide of a coronavirus, in particular of the SARS-CoV-2, such as the sequence encoding the N, E, M, ORF3a, ORF7a, ORF8 polypeptide of a coronavirus, in particular of SARS-CoV-2, or an antigenic or immunogenic fragment thereof that may be obtained using the a sequence disclosed in Genbank MN908947.3 or that may have the nucleotide sequences disclosed herein.

[0451] In a preferred embodiment of the invention, the nucleic acid construct comprises or consists of a recombinant MV-CoV nucleic acid molecule that comprises a second heterologous polynucleotide that encodes the N polypeptide of a coronavirus, in particular of SARS-CoV-2, or an immunogenic fragment thereof that has 1, 2, 3 or more amino acid substitution(s), insertion(s) and/or deletion(s), the second heterologous polynucleotide being cloned in an ATU at a different location with respect to the ATU used for cloning the first heterologous polynucleotide.

[0452] In a particular embodiment such nucleic acid construct is inserted, in particular cloned in an expression vector or a transfer vector, for example in a plasmid. Examples of suitable plasmids are the pTM plasmid know from Combredet et al (2003) or from WO 04/00876, or the pKM plasmid disclosed herein.

[0453] Any nucleic acid construct described herein is suitable and intended for the preparation of recombinant infectious replicative measles—coronavirus virus (MV-CoV) and accordingly the nucleic acid construct: (i) is used for insertion in a transfer genome vector that as a result comprises the cDNA molecule of the measles virus, especially of the Schwarz strain, for the production of the MV-CoV and yield of at least one polypeptide of a coronavirus (CoV), in particular of SARS-CoV-2, or an immunogenic fragment thereof that has 1, 2, 3 or more amino acid substitution(s), insertion(s) and/or deletion(s), in particular the spike (S) polypeptide or an immunogenic fragment thereof as disclosed herein or (ii) is such transfer vector, especially plasmid vector.

[0454] The nucleic acid construct may also be used for the production of viral-like particles (VLPs), in particular CoV VLPs.

[0455] As an example, the pTM-MVSchw plasmid or the pTM2-MVSchw plasmid is suitable to prepare the transfer vector, by insertion of the CoV polynucleotide(s) necessary for the expression of at least a spike (S) polypeptide or another antigen such as N, M, E, ORF7a, ORF3a or ORF8 of a coronavirus (CoV), in particular of SARS-CoV-2, or an immunogenic fragment thereof that has 1, 2, 3 or more amino acid substitution(s), insertion(s) and/or deletion(s). Alternatively such transfer vector may be the pKM vectors described in detail in the examples, including pKP-MVSchw-ATU1(eGFP), pKP-MVSchw-ATU2(eGFP), pKP-MVSchw-ATU3(eGFP) wherein the nucleotide sequence of the eGFP is replaced by the polynucleotide encoding the spike (S) polypeptide or another antigen such as N, M, E, ORF7a, ORF3a or ORF8 of a coronavirus (CoV), in particular of SARS-CoV-2, or an immunogenic fragment thereof that has 1, 2, 3 or more amino acid substitution(s), insertion(s) and/or deletion(s). The herein disclosed sequences enable the person skilled in the art to have access to the position of the inserts contained in the plasmids to design and prepare insert substitution especially using the disclosure in the examples.

[0456] All the plasmids cited herein by reference to their deposit at the CNCM have been deposited at the Collection Nationale de Cultures de Microorganismes, 25 rue du Docteur Roux, 75724 Paris Cedex 15 (France).

[0457] According to a particular aspect of a nucleic acid construct, the invention relates to a transfer vector, in particular a plasmid vector, suitable for the rescue of a recombinant Measles virus (MV) comprising the nucleic acid construct according to the invention, in particular a transfer vector selected from the group consisting of plasmid of SEQ ID NO: 28 (pTM-MVSchwarz), plasmid of SEQ ID NO: 29 (pTM2-MVSchw-gfp, also named pTM-MVSchw2-GFPbis or pTM-MVSchwarz-ATU2-CNCM I-3034 deposited on May 26, 2003 with the insertion of the GFPbis coding sequence), plasmid of SEQ ID NO: 38 (pTM3-MVSchw-gfp, also named pTM-MVSchw3-GFP or pTM-MVSchwarz-ATU3-CNCM I-3037 deposited on May 26, 2003 with the insertion of the GFP coding sequence), plasmid of SEQ ID NO: 30 (pKP-MVSchwarz), plasmid of SEQ ID NO: 31 (pKP-MVSchwarz-ATU1), plasmid of SEQ ID NO: 32 (pKP-MVSchwarz-ATU2) and plasmid of SEQ ID NO: 33 (pKP-MVSchwarz-ATU3) wherein the transfer vector is recombined with (i) a first heterologous DNA polynucleotide encoding at least a spike polypeptide of a coronavirus, in particular of SARS-CoV-2, or an immunogenic fragment thereof that has 1, 2, 3 or more amino acid substitution(s), insertion(s) and/or deletion(s) has been positioned within an additional transcription unit (ATU) inserted within the cDNA of the antigenomic (+) RNA or with (ii) a second heterologous polynucleotide encoding another polypeptide of a coronavirus, in particular of SARS-CoV-2, such as the sequence of the N, E, M, ORF3a, ORF7a, ORF8 polypeptide of a coronavirus, in particular of SARS-CoV-2 such as a sequence derived from the sequence disclosed in Genbank MN908947.3 or corresponding to a sequence disclosed herein.

[0458] According to a preferred aspect of the nucleic acid construct, the invention relates to a transfer vector, in particular a plasmid vector, suitable for the rescue of a recombinant Measles virus (MV) comprising the nucleic acid construct according to the invention, in particular a transfer vector selected from the group consisting of plasmid of SEQ ID NO: 32 (pKP-MVSchwarz-ATU2) and plasmid of SEQ ID NO: 33 (pKP-MVSchwarz-ATU3) wherein the transfer vector is recombined with a first heterologous DNA polynucleotide encoding the polypeptide of SARS-CoV-2 as defined in any one of claims 1, 2, 4 and 6 that has been positioned within ATU2 or ATU3.

[0459] In a particular embodiment, the transfer vector is a plasmid, especially one of the above plasmids recombined with a recombinant DNA MV-CoV sequence wherein the sequence encoding a polypeptide of SARS-CoV-2 is selected from the group consisting of:
[0460] SEQ ID NO: 1 or 2 or 36 (construct S);
[0461] SEQ ID NO: 4 (construct stab-S, also named construct S2P);
[0462] SEQ ID NO: 6 (construct Secto);
[0463] SED ID NO: 8 (construct stab-Secto);
[0464] SEQ ID NO: 10 (construct S1),
[0465] SEQ ID NO: 12 (construct S2),
[0466] SEQ ID NO: 14 (construct stab-S2),
[0467] SEQ ID NO: 16 (construct tri-Secto),
[0468] SEQ ID NO: 18 (construct tristab-Secto),
[0469] SEQ ID NO: 42 (construct S3F),
[0470] SEQ ID NO: 44 (construct S2P3F),
[0471] SEQ ID NO: 46 (construct S2PΔF),
[0472] SEQ ID NO: 48 (construct S2PΔF2A),
[0473] SEQ ID NO: 21 or 37 (construct N),
[0474] SEQ ID NO: 51 (construct T4-S2P3F (tristab-Secto-3F)),
[0475] SEQ ID NO: 53 (construct S6P),
[0476] SEQ ID NO: 55 (construct S6P3F),
[0477] SEQ ID NO: 57 (construct S6PΔF),
[0478] SEQ ID NO: 59 (construct SCCPP),
[0479] SEQ ID NO: 61 (construct SCC6P),
[0480] SEQ ID NO: 63 (construct S_{MVopt}2P),
[0481] SEQ ID NO: 64 (construct S_{MVopt}ΔF), and
[0482] SEQ ID NO: 66 (construct S_{MVopt}2PΔF).

[0483] In a preferred embodiment, the transfer vector is a plasmid, especially one of the above plasmids recombined with a recombinant DNA MV-CoV sequence wherein the sequence encoding a polypeptide of SARS-CoV-2 is selected from the group consisting of:
[0484] SEQ ID NO: 2 (construct S);
[0485] SEQ ID NO: 4 (construct stab-S, also named construct S2P);
[0486] SEQ ID NO: 42 (construct S3F),
[0487] SEQ ID NO: 44 (construct S2P3F),
[0488] SEQ ID NO: 46 (construct S2PΔF), and
[0489] SEQ ID NO: 48 (construct S2PΔF2A).

[0490] In a more preferred embodiment, the transfer vector is a plasmid, especially one of the above plasmids recombined with a recombinant DNA MV-CoV sequence wherein the sequence encoding a polypeptide of SARS-CoV-2 is of SEQ ID NO: 48 (construct S2PΔF2A). When the sequence encoding the eGFP is present in the plasmid it is advantageously substituted by a sequence selected in the group defined above that is inserted in an ATU.

[0491] In a particular embodiment, the transfer vector is derived from the plasmids selected among:
[0492] pKP-MVSchwarz (or pKM-Schwarz) deposited under No. CNCM I-5493 on Feb. 12, 2020,
[0493] pKM-ATU2(eGFP) deposited under No. CNCM I-5494 on Feb. 12, 2020,
[0494] pKM-ATU3(eGFP) deposited under No. CNCM I-5495 on Feb. 12, 2020, in particular is one of these plasmids comprising a polynucleotide selected among the polynucleotides having the sequence of SEQ ID NO: 1, 2 or 36, preferably of SEQ ID NO: 2, or of SEQ ID NO: 4, 6, 8, 10, 12, 14, 16, 18, 42, 44, 46, 48, 21 or 37, in particular of SEQ ID NO: 4, 42, 44, 46, 48, preferably of SEQ ID NO: 44, 46 or 48, preferably of SEQ ID NO: 46 or SEQ ID NO: 48, even more preferably of SEQ ID NO: 48 inserted in an ATU in particular to replace the eGFP coding sequence, preferably in an ATU3.
   or is one of the plasmids selected from the group consisting of:
[0495] pKM-ATU2-S_2019-nCoV (i.e. SARS-CoV-2) deposited under No. CNCM I-5496 on Feb. 12, 2020,
[0496] pKM-ATU3-S_2019-nCoV (i.e. SARS-CoV-2) deposited under No. CNCM I-5497 on Feb. 12, 2020,
[0497] pKM-ATU3-S2PΔF_2019-nCoV (i.e. SARS-CoV-2) deposited under No. CNCM I-5532 on Jul. 1, 2020,
[0498] pKM-ATU3-S2PΔF2A_2019-nCoV (i.e. SARS-CoV-2) deposited under No. CNCM I-5533 on Jul. 1, 2020,
[0499] pKM-ATU3-S2P3F_2019-nCoV (i.e. SARS-CoV-2) deposited under No. CNCM I-5534 on Jul. 1, 2020,
[0500] pKM-ATU3-S3F_2019-nCoV (i.e. SARS-CoV-2) deposited under No. CNCM I-5535 on Jul. 1, 2020, and
[0501] pKM-ATU3-stab-S_2019-nCoV (i.e. SARS-CoV-2) (also named pKM-ATU3-S2P_2019-nCoV (i.e. SARS-CoV-2)) deposited under No. CNCM I-5536 on Jul. 7, 2020,
   preferably is the plasmid selected from the group consisting of pKM-ATU3-S2P3F_2019-nCoV (i.e. SARS-CoV-2), pKM-ATU3-S2PΔF_2019-nCoV (i.e. SARS-CoV-2) and pKM-ATU3-S2PΔF2A_2019-nCoV (i.e. SARS-CoV-2), more preferably is the plasmid pKM-ATU3-S2PΔF2A_2019-nCoV (i.e. SARS-CoV-2) deposited under No. CNCM I-5533 on Jul. 1, 2020.

[0502] According to a preferred aspect of the nucleic acid construct, the invention relates to a transfer vector, in particular a plasmid vector, suitable for the rescue of a recombinant Measles virus (MV) comprising the nucleic acid construct according to the invention, in particular a transfer vector consisting of a plasmid of SEQ ID NO: 29 (pTM2-MVSchw-gfp, also named pTM-MVSchw2-GFPbis or pTM-MVSchwarz-ATU2) or plasmid of SEQ ID NO: 38 (pTM3-MVSchw-gfp, also named pTM-MVSchw3-GFP or pTM-MVSchwarz-ATU3), wherein the transfer vector is recombined with a first heterologous DNA polynucleotide encoding the SF-2P-dER polypeptide or the SF-2P-2a polypeptide of SARS-CoV-2, or consisting of an immunogenic fragment thereof that has 1, 2, 3 or more amino acid substitution(s), insertion(s) and/or deletion(s) that has been positioned within ATU2 or ATU3, preferably ATU2.

[0503] In a particular embodiment, the transfer vector is a plasmid, especially one of the above plasmids recombined with a recombinant DNA MV-CoV sequence wherein the sequence encoding a polypeptide of SARS-CoV-2 is selected from the group consisting of:
[0504] SEQ ID NO: 1 or 2 or 36 (construct S);
[0505] SEQ ID NO: 4 (construct stab-S, also named construct S2P);
[0506] SEQ ID NO: 6 (construct Secto);
[0507] SED ID NO: 8 (construct stab-Secto);
[0508] SEQ ID NO: 10 (construct S1),
[0509] SEQ ID NO: 12 (construct S2),
[0510] SEQ ID NO: 14 (construct stab-S2),
[0511] SEQ ID NO: 16 (construct tri-Secto),
[0512] SEQ ID NO: 18 (construct tristab-Secto), and
[0513] SEQ ID NO: 21 or 37 (construct N).

[0514] In a preferred embodiment, the transfer vector is a plasmid, especially one of the above plasmids recombined with a recombinant DNA MV-CoV sequence wherein the sequence encoding a polypeptide of SARS-CoV-2 is selected from the group consisting of:
[0515] SEQ ID NO: 2 (construct S); and
[0516] SEQ ID NO: 4 (construct stab-S, also named construct S2P).

[0517] In another preferred embodiment, the transfer vector is a plasmid recombined with a recombinant DNA of MV-CoV, wherein the sequence encoding the SF-2P-dER polypeptide of SARS-CoV-2 is SEQ ID NO: 75 and the sequence encoding the SF-2P-2a polypeptide of SARS-CoV-2 is SEQ ID NO: 81, preferably the sequence encoding the SF-2P-dER polypeptide of SARS-CoV-2 is SEQ ID NO: 75. When the sequence encoding the eGFP is present in the plasmid it is advantageously substituted by a sequence selected in the group defined above that is inserted in an ATU.

[0518] In a particular embodiment, the transfer vector is derived from the plasmids selected among:
[0519] pKP-MVSchwarz (or pKM-Schwarz) deposited under No. CNCM I-5493 on Feb. 12, 2020,
[0520] pKM-ATU2(eGFP) deposited under No. CNCM I-5494 on Feb. 12, 2020,
[0521] pKM-ATU3(eGFP) deposited under No. CNCM I-5495 on Feb. 12, 2020, in particular is one of these plasmids comprising a polynucleotide selected among the polynucleotides having the sequence of SEQ ID NO: 1, 2 or 36, preferably of SEQ ID NO: 2, or of SEQ ID NO: 4, 6, 8, 10, 12, 14, 16, 18, 21 or 37, in particular of SEQ ID NO: 4 inserted in an ATU in particular to replace the eGFP coding sequence, preferably in an ATU3.
   or is one of the plasmids selected from the group consisting of:
[0522] pKM-ATU2-S_2019-nCoV (i.e. SARS-CoV-2) deposited under No. CNCM I-5496 on Feb. 12, 2020,
[0523] pKM-ATU3-S_2019-nCoV (i.e. SARS-CoV-2) deposited under No. CNCM I-5497 on Feb. 12, 2020, and
[0524] pKM-ATU3-stab-S_2019-nCoV (i.e. SARS-CoV-2) (also named pKM-ATU3-S2P_2019-nCoV (i.e. SARS-CoV-2)) deposited under No. CNCM I-5536 on Jul. 7, 2020.

[0525] In another particular embodiment, the transfer vector is one of the plasmids selected from the group consisting of pTM2-SF-dER_SARS-CoV-2 of SEQ ID NO: 144, pTM2-S2-dER_SARS-CoV-2 of SEQ ID NO: 145, pTM2-SF-2P-dER_SARS-CoV-2 of SEQ ID NO: 146, pTM2-S2-2P-dER_SARS-CoV-2 of SEQ ID NO: 147 and pTM2-SF-2P-2a_SARS-CoV-2 of SEQ ID NO: 148, preferably is pTM2-SF-2P-dER_SARS-CoV-2 of SEQ ID NO: 146 or pTM2-SF-2P-2a_SARS-CoV-2 of SEQ ID NO: 148, even more preferably is pTM2-SF-2P-dER_SARS-CoV-2 of SEQ ID NO: 146.

[0526] The invention also concerns the use of said transfer vector to transform cells suitable for rescue of viral MV-CoV particles, in particular to transfect or to transduce such cells respectively with plasmids or with viral vectors harboring the nucleic acid construct of the invention, the cells being selected for their capacity to express required MV proteins for appropriate replication, transcription and encapsidation of the recombinant genome of the virus corresponding to the nucleic acid construct of the invention in recombinant infectious replicating MV-CoV particles.

[0527] In a preferred embodiment, the invention relates to a host cell which is a helper cell, an amplification cell or a production cell, transfected with the nucleic acid construct according to the invention or with the transfer plasmid vector according to the invention, or infected with the recombinant measles virus according to the invention, in particular a mammalian cell, VERO NK cells, CEF cells, human embryonic kidney cell line 293 or lines derived therefrom (293T or 293T-T7 cells deposited at the CNCM (Paris France) under number I-3618 deposited on 14 Jun. 2006) or MRC5 cells.

[0528] Polynucleotides are thus present in the cells, which encode proteins that include in particular the N, P and L proteins of a MV (i.e., native MV proteins or functional variants thereof capable of forming ribonucleoprotein (RNP) complexes as a replicon), as stably expressed proteins at least for the N and P proteins or as or transitorily expressed proteins, functional in the transcription and replication of the recombinant viral MV-CoV particles. The N and P proteins may be expressed in the cells from a plasmid comprising their coding sequences or may be expressed from a DNA molecule inserted in the genome of the cell. The L protein may be expressed from a different plasmid. It may be expressed transitory. The helper cell is also capable of expressing a RNA polymerase suitable to enable the synthesis of the recombinant RNA derived from the nucleic acid construct of the invention, possibly as a stably expressed RNA polymerase. The RNA polymerase may be the T7 phage polymerase or its nuclear form (nlsT7).

[0529] In an embodiment of the invention, the cDNA clone of MV is from the same MV strain as the N protein and/or the P protein and/or the L protein. In another embodiment of the invention, the cDNA clone of a MV is from a different strain of virus than the N protein and/or the P protein and/or the L protein.

[0530] The invention also relates to a process for the preparation of recombinant infectious measles virus (MV) particles comprising:
[0531] 1) transferring, in particular transfecting, the nucleic acid construct of the invention or the transfer vector containing such nucleic acid construct in a helper cell line which also expresses proteins necessary for transcription, replication and encapsidation of the antigenomic (+)RNA sequence of MV from its cDNA and under conditions enabling viral particles assembly; and
[0532] 2) recovering the recombinant infectious MV-CoV particles expressing at least one polypeptide consisting of the spike (S) polypeptide of a coronavirus (CoV), in particular of SARS-CoV-2, or consisting of an immunogenic fragment thereof that has 1, 2, 3 or more amino acid substitution(s), insertion(s) and/or deletion(s).

[0533] In a particular embodiment of the invention, this process comprises:
[0534] 1) transfecting helper cells with a nucleic acid construct according to the invention and with a transfer vector, wherein the helper cells are capable of expressing helper functions to express an RNA polymerase, and to express the N, P and L proteins of a MV virus;
[0535] 2) co-cultivating the transfected helper cells of step 1) with passaged cells suitable for the passage of the MV attenuated strain from which the cDNA originates;
[0536] 3) recovering the recombinant infectious MV-CoV particles expressing at least one polypeptide consisting of the spike (S) polypeptide of a coronavirus (CoV), in particular of SARS-CoV-2, or consisting of an immunogenic fragment thereof that has 1, 2, 3 or more amino acid substitution(s), insertion(s) and/or deletion(s).

[0537] In another particular embodiment of the invention, the method for the production of recombinant infectious MV-CoV particles comprises:
[0538] 1) recombining a cell or a culture of cells stably producing a RNA polymerase, the N protein of a MV and the P protein of a MV, with a nucleic acid construct of the invention and with a vector comprising a nucleic acid encoding the L protein of a MV, and
[0539] 2) recovering the recombinant infectious MV-CoV particles from the recombinant cell or culture of recombinant cells.

[0540] In a particular embodiment of the process, recombinant MV are produced, which express at least one polypeptide consisting of the spike (S) polypeptide of a coronavirus (CoV), in particular of SARS-CoV-2, or consisting of an immunogenic fragment thereof that has 1, 2, 3 or more amino acid substitution(s), insertion(s) and/or deletion(s), in particular CoV VLPs expressing the same CoV protein(s).

[0541] The invention thus relates to recombinant infectious replicating MV-CoV particles that may be recovered from rescue helper cells or in production cells. Optionally, VLP expressing the CoV antigens disclosed in accordance with the invention may additionally be recovered.

[0542] In a particular embodiment, the recombinant MV are produced, which express at least one polypeptide consisting of the spike (S) polypeptide of a coronavirus (CoV), in particular of SARS-CoV-2, or consisting of an immunogenic fragment thereof that has 1, 2, 3 or more amino acid substitution(s), insertion(s) and/or deletion(s) according to the various embodiments disclosed herein.

[0543] In a particular embodiment, the recombinant MV particles express at least one polypeptide consisting of the N, E, M, ORF7a, ORF3a, ORF8 polypeptide of a coronavirus (CoV), in particular of SARS-CoV-2, or consisting of an immunogenic fragment thereof that has 1, 2, 3 or more amino acid substitution(s), insertion(s) and/or deletion(s) according to the various embodiments disclosed herein.

[0544] In a particular embodiment, the recombinant MV particles express at least one polypeptide consisting of the spike (S) polypeptide of a coronavirus (CoV), in particular of SARS-CoV-2, or consisting of an immunogenic fragment thereof that has 1, 2, 3 or more amino acid substitution(s), insertion(s) and/or deletion(s) according to the various embodiments disclosed herein and additionally express at least one polypeptide consisting of the N, E, M, ORF7a, ORF3a, ORF8 polypeptide of a coronavirus (CoV), in particular of SARS-CoV-2, or consisting of an immunogenic fragment thereof that has 1, 2, 3 or more amino acid substitution(s), insertion(s) and/or deletion(s) according to the various embodiments disclosed herein.

[0545] In a particular embodiment of the invention, the particles are obtained from a measles virus which is an attenuated virus strain selected from the group consisting of the Schwarz strain according to all embodiments disclosed herein, the Zagreb strain, the AIK-C strain, the Moraten strain, the Philips strain, the Beckenham 4A strain, the Beckenham 16 strain, the CAM-70 strain, the TD 97 strain, the Leningrad-16 strain, the Shanghai 191 strain and the Belgrade strain, in particular the Schwarz strain.

[0546] In a particular embodiment the recombinant measles virus, in particular the recombinant measles virus of the Schwarz strain, comprises in its genome a nucleic acid construct which encodes at least one polypeptide consisting of the spike polypeptide of a coronavirus, in particular of SARS-CoV-2, or an immunogenic fragment thereof that has 1, 2, 3 or more amino acid substitution(s), insertion(s) and/or deletion(s) or one polypeptide consisting of the N, E, M, ORF7a, ORF3a, ORF8 polypeptide of a coronavirus (CoV), in particular of SARS-CoV-2, or consisting of an immunogenic fragment thereof that has 1, 2, 3 or more amino acid substitution(s), insertion(s) and/or deletion(s), in particular comprises in its genome a transcript of a nucleotide construct of the invention, in particular a nucleic acid construct as defined above which is a replicon of a transfer vector of the invention, the nucleic acid construct being operatively linked with the genome in an expression cassette. In a preferred embodiment, the recombinant measles virus, in particular a recombinant measles virus of the Schwarz strain, comprises in its genome the nucleic acid construct according to the invention, in particular a nucleic acid construct which encodes the SF-2P-dER polypeptide or the SF-2P-2a polypeptide of SARS-CoV-2, or an immunogenic fragment thereof that has 1, 2, 3 or more amino acid substitution(s), insertion(s) and/or deletion(s), in particular a polypeptide encoded by a nucleotide sequence of SEQ ID NO: 75 or SEQ ID NO: 81, preferably of SEQ ID NO: 75, in particular a nucleic acid construct which is a replicon of a transfer vector of the invention, the nucleic acid construct being operatively linked with the genome in an expression cassette. In a more preferred embodiment, the recombinant measles virus, in particular a recombinant measles virus of the Schwarz strain, expresses the SF-2P-dER polypeptide or the SF-2P-2a polypeptide of the SARS-CoV-2 strain, or an immunogenic fragment thereof that has 1, 2, 3 or more amino acid substitution(s), insertion(s) and/or deletion(s), and optionally further expresses at least one of a N polypeptide, M polypeptide, E polypeptide, ORF7a, ORF8 or ORF3a polypeptide of the SARS-CoV-2 strain or an immunogenic fragment thereof that has 1, 2, 3 or more amino acid substitution(s), insertion(s) and/or deletion(s).

[0547] In a more preferred embodiment, the recombinant measles virus further expresses at least one of a N polypeptide, M polypeptide, E polypeptide, ORF7a, ORF8 or ORF3a polypeptide of the SARS-CoV-2 strain, in particular further expressing the N polypeptide of SEQ ID NO: 22, an immunogenic fragment thereof or an antigenic fragment thereof, or a mutated antigen of the N polypeptide by substitution of 1, 2 or less than 10 amino acid residue(s), in particular less than 5 amino acid residues and/or the M polypeptide of sequence SEQ ID NO: 24 or its endodomain, the E polypeptide of sequence SEQ ID NO: 23, the ORF8 polypeptide of SEQ ID NO: 25, the ORF7a polypeptide of SEQ ID NO: 27 and/or the ORF3a polypeptide of SEQ ID NO: 26 of SARS-CoV-2, or an immunogenic fragment thereof that has 1, 2, 3 or more amino acid substitution(s), insertion(s) and/or deletion(s).

[0548] In a particular embodiment, the nucleotide sequence of the nucleic acid molecule encoding the polypeptide of a coronavirus, in particular of SARS-CoV-2 is selected from the group consisting of SEQ ID NOs: 1, 2, 4, 6, 8, 10, 12, 14, 16, 18, 20, 21, 36, 37, 42, 44, 46 and 48.

[0549] In a particular embodiment, the nucleotide sequence of the nucleic acid molecule encoding the polypeptide of a coronavirus, in particular of SARS-CoV-2 is selected from the group consisting of SEQ ID NOs: 1, 2, 4, 6, 8, 10, 12, 14, 16, 18, 20, 21, 36 and 37.

[0550] In a preferred embodiment of the invention, the nucleic acid molecule comprises a polynucleotide of SEQ ID NO: 75 (construct SF-2P-dER) or SEQ ID NO: 81 (construct SF-2P-2a), preferably a polynucleotide of SEQ ID NO: 75 (construct SF-2P-dER).

[0551] In a preferred embodiment, the nucleotide sequence of the nucleic acid molecule encoding the polypeptide of a coronavirus, in particular of SARS-CoV-2 is selected from the group consisting of SEQ ID NOs: 2, 4, 42, 44, 46 and 48, preferably is selected from the group consisting of SEQ ID NOs: 2, 4, 42 or from the group consisting of SEQ ID NOs: 44, 46 and 48, even more preferably is selected from the group consisting of SEQ ID NOs: 44, 46 and 48.

[0552] In a preferred embodiment, the nucleotide sequence of the nucleic acid molecule encoding the polypeptide of a coronavirus, in particular of SARS-CoV-2 is of SEQ ID NO: 2 or SEQ ID: 4.

[0553] In an even more preferred embodiment, the nucleotide sequence of the nucleic acid molecule encoding the polypeptide of a coronavirus, in particular of SARS-CoV-2 is of SEQ ID NO: 46 or SEQ ID NO: 48, preferably is of SEQ ID NO: 48.

[0554] The invention also relates to a process for rescuing recombinant measles virus expressing at least one polypeptide consisting of at least one of the (i) N, E, M, ORF7a, ORF3a, ORF8 polypeptide of a coronavirus (CoV), in particular of SARS-CoV-2, or consisting of an immunogenic fragment thereof that has 1, 2, 3 or more amino acid substitution(s), insertion(s) and/or deletion(s) according to the various embodiments described herein or (ii) a polypeptide consisting of the spike (S) polypeptide of a coronavirus, in particular of SARS-CoV-2 or an immunogenic fragment thereof that has 1, 2, 3 or more amino acid substitution(s), insertion(s) and/or deletion(s) according to the various embodiments described herein comprising:
[0555] (a) co-transfecting cells, in particular helper cells, in particular HEK293 helper cells, stably expressing T7 RNA polymerase and measles virus N and P proteins with (i) the nucleic acid construct according to the invention or with the transfer plasmid vector according to the invention that encodes the at least one polypeptide, and with (ii) a vector, especially a plasmid, encoding the MV L polymerase,
[0556] (b) maintaining the transfected cells in conditions suitable for the production of recombinant measles virus;
[0557] (c) infecting cells enabling propagation of the recombinant measles virus by co-cultivating them with the transfected cells of step (b), in particular VERO cells;
[0558] (d) harvesting the recombinant measles virus expressing at least the polypeptide of the coronavirus or an immunogenic fragment thereof that has 1, 2, 3 or more amino acid substitution(s), insertion(s) and/or deletion(s) of a coronavirus, in particular of SARS-CoV-2.

[0559] According to a preferred embodiment of the invention, the process for rescuing recombinant measles virus expresses the polypeptide of SARS-CoV-2 encoded by the first heterologous polynucleotide of SARS-CoV-2 as defined above comprising:
[0560] (a) co-transfecting cells, in particular helper cells, in particular HEK293 helper cells, stably expressing T7 RNA polymerase and measles virus N and P proteins with (i) the nucleic acid construct of the invention or with the transfer plasmid vector of the invention, and with (ii) a vector, especially a plasmid, encoding the MV L polymerase;
[0561] (b) maintaining the transfected cells in conditions suitable for the production of recombinant measles virus;
[0562] (c) infecting cells enabling propagation of the recombinant measles virus by co-cultivating them with the transfected cells of step (b), in particular VERO cells;
[0563] (d) harvesting the recombinant measles virus expressing the polypeptide of SARS-CoV-2 encoded by the first heterologous polynucleotide of SARS-CoV-2 as defined above and optionally at least one of the N, M or 3A polypeptide or an immunogenic fragment thereof or a mutated antigen thereof that has 1, 2, 3 or more amino acid substitution(s), insertion(s) and/or deletion(s) of SARS-CoV-2.

[0564] According to a preferred embodiment of the process, the recombinant measles virus expresses a mutated polypeptide as defined above, wherein the mutation at least impairs the retrieval of the polypeptide in the Endoplasmic Reticulum (ER) and optionally maintains the expressed protein in its prefusion state, in particular the SF-2P-dER polypeptide, in particular of SEQ ID NO: 76, or the SF-2P-2a polypeptide, in particular of SEQ ID NO: 82.

[0565] According to a particular embodiment of the process, the transfer vector plasmid has the sequence of SEQ ID NO: 34, SEQ ID NO: 35, or is one of the vectors deposited at the CNCM and disclosed herein under numbers I-5496, I-5497 and I-5536.

[0566] According to a particular embodiment of the process, the transfer vector plasmid has the sequence of SEQ ID NO: 34, SEQ ID NO: 35, or is one of the vectors deposited at the CNCM and disclosed herein under numbers I-5496, I-5497, I-5532, I-5533, I-5534, I-5535 and I-5536.

[0567] According to another particular embodiment of said process, the transfer vector plasmid has the sequence of SEQ ID NO: 146 or SEQ ID NO: 148, preferably of SEQ ID NO: 146.

[0568] According to a particular embodiment, recombination can be obtained with a first polynucleotide, which is the nucleic acid construct of the invention. Recombination can, also or alternatively, encompass introducing a polynucleotide, which is a vector encoding a RNA polymerase large protein (L) of a MV, whose definition, nature and stability of expression has been described herein.

[0569] In accordance with the invention, the cell or cell lines or a culture of cells stably producing a RNA polymerase, a nucleoprotein (N) of a measles virus and a polymerase cofactor phosphoprotein (P) of a measles virus is a cell or cell line as defined in the present specification or a culture of cells as defined in the present specification, i.e., are also recombinant cells to the extent that they have been modified by the introduction of one or more polynucleotides as defined above. In a particular embodiment of the invention, the cell or cell line or culture of cells, stably producing the RNA polymerase, the N and P proteins, does not produce the L protein of a measles virus or does not stably produce the L protein of a measles virus, e.g., enabling its transitory expression or production.

[0570] The production of recombinant infectious replicating MV-CoV particles of the invention may involve a transfer of cells transformed as described herein. This step is introduced after further recombination of the recombinant cells of the invention with nucleic acid construct of the invention, and optionally a vector comprising a nucleic acid encoding a RNA polymerase large protein (L) of a measles virus.

[0571] In a particular embodiment of the invention, a transfer step is required since the recombinant cells, usually chosen for their capacity to be easily recombined are not efficient enough in the sustaining and production of recombinant infectious MV-CoV particles. In the embodiment, the cell or cell line or culture of cells of step 1) of the above-defined methods is a recombinant cell or cell line or culture of recombinant cells according to the invention.

[0572] Cells suitable for the preparation of the recombinant cells of the invention are prokaryotic or eukaryotic cells, particularly animal or plant cells, and more particularly mammalian cells such as human cells or non-human mammalian cells or avian cells or yeast cells. In a particular embodiment, cells, before recombination of its genome, are isolated from either a primary culture or a cell line. Cells of the invention may be dividing or non-dividing cells.

[0573] According to a preferred embodiment, helper cells are derived from human embryonic kidney cell line 293, which cell line 293 is deposited with the ATCC under No. CRL-1573. Particular cell line 293 is the cell line disclosed in the international application WO2008/078198 (i.e. the HEK-293-T7-NP or HEK-293T-NP MV cell line deposited with the CNCM (Paris, France) on Jun. 14, 2006, under number I-3618) and referred to in the following examples.

[0574] According to another aspect of this process, the cells suitable for passage are CEF cells. CEF cells can be prepared from fertilized chicken eggs as obtained from EARL Morizeau, 8 rue Moulin, 28190 Dangers, France, or from any other producer of fertilized chicken eggs.

[0575] The process which is disclosed according to the present invention is used advantageously for the production of infectious replicative MV-CoV particles that may be used in an immunogenic composition. Optionally VLPs expressing CoV antigens may also be expressed that are appropriate for use in immunization compositions. Accordingly the invention concerns the recombinant MV-CoV particles of the invention for use in eliciting a humoral, especially a protective, in particular a neutralizing humoral response and/or a cellular response in an animal host, in particular a mammalian host, especially in a human being. The recombinant MV-CoV particles are in particular for use in eliciting a prophylactic response against infection by a coronavirus, in particular SARS-CoV-2.

[0576] The invention thus relates to an immunogenic composition, advantageously a vaccine composition comprising (i) an effective dose of the recombinant measles virus according to the invention, and/or of the recombinant VLPs according to the invention and (ii) a pharmaceutically acceptable vehicle, wherein the composition or the vaccine elicits a humoral, especially a protective, in particular a neutralizing humoral response and/or a cellular response in an animal host, especially in a human being, in particular after a single immunization, against the polypeptide(s) of the coronavirus, in particular of SARS-CoV-2 or their fragments, that it expresses.

[0577] In a particular embodiment of the invention, the composition is used in the elicitation of a protective, and preferentially prophylactic, immune response against SARS-CoV-2 or against SARS-CoV-2 and against further distinct coronavirus(es), by the elicitation of antibodies recognizing coronavirus protein(s) or antigenic fragment(s) thereof or mutated antigen(s) thereof that has(have) 1, 2, 3 or more amino acid substitution(s), insertion(s) and/or deletion(s), and/or by the elicitation of a cellular and/or humoral and cellular response against the Coronavirus, in a host in need thereof, in particular a human host, in particular a child. Preferably, the composition is devoid of added adjuvant.

[0578] The invention also relates to an immunogenic or vaccine composition comprising (i) an effective dose of the recombinant measles virus according to the invention, and/or of the recombinant VLPs according to the invention and (ii) a pharmaceutically acceptable vehicle for use in the prevention or treatment of an infection by CoV, in particular SARS-CoV-2 or in the prevention of clinical outcomes of infection by CoV in a host in need thereof, in particular a human host, in particular a child. In a particular embodiment, the composition is for administration to children, adolescents or travelers.

[0579] Methods of Treatment

[0580] Provided herein are compositions (e.g., pharmaceutical compositions), methods, kits and reagents for prevention and/or treatment of a coronavirus infection, particularly SARS-CoV-2 virus infection in humans and/or other mammals. The measles viruses of this disclosure may be used to induce an immune response or as therapeutic or prophylactic agents, including as vaccines. They may be used in medicine to prevent and/or treat infectious disease. In exemplary aspects, the recombinant measles virus vaccines of the present disclosure are used to provide prophylactic protection from coronavirus, particularly SARS-CoV-2 virus. Prophylactic protection from SARS-CoV-2 virus can be achieved following administration of a recombinant measles virus and/or immunogenic composition of the present disclosure. Vaccines can be administered once, twice, three times, four times or more. It is possible, although less desirable, to administer the vaccine to an infected individual to achieve a therapeutic response. Dosing may be adjusted accordingly in certain embodiments.

[0581] In some embodiments, the recombinant measles virus and immunogenic compositions of the present disclosure can be used as a method of preventing a coronavirus infection, particularly SARS-CoV-2 infection, in a subject, the method comprising administering to said subject at least one recombinant measles virus or immunogenic composition as provided herein. In some embodiments, the recombinant measles viruses or immunogenic compositions of the present disclosure can be used as a method of treating a coronavirus infection, particularly SARS-CoV-2 infection, in a subject, the method comprising administering to the subject at least one recombinant measles virus or immunogenic composition as provided herein. In some embodiments, the recombinant measles virus or immunogenic composition of the present disclosure can be used as a method of reducing an incidence of coronavirus infection, particularly SARS-CoV-2 infection, in a subject, the method comprising administering to the subject at least recombinant measles virus or immunogenic composition as provided herein. In some embodiments, the recombinant measles virus or immunogenic composition of the present disclosure can be used as a method of inhibiting spread of coronavirus, particularly SARS-CoV-2, from a first subject infected with coronavirus to a second subject not infected with coronavirus, particularly SARS-CoV-2, the method comprising administering to at least one of the first subject and said second subject at least one recombinant measles virus or immunogenic composition as provided herein.

[0582] A method of inducing an immune response in a subject against coronavirus, particularly SARS-CoV-2 is provided in aspects of the invention. The method involves administering to the subject a recombinant measles virus or immunogenic composition described herein, thereby inducing in the subject an immune response specific to coronavirus antigenic polypeptide or an immunogenic fragment thereof, particularly a full length SARS-CoV-2 antigenic polypeptide.

[0583] In some embodiments, the mutated antigen of the full length S protein or of the immunogenic fragment or the antigenic fragment is (a) the TA-S2P3F polypeptide of SEQ ID NO: 52, or a variant thereof having at least 90% identity with SEQ ID NO: 52, wherein the variant does not vary at positions 682, 683, 685, 986 and 987; or (b) the S6P polypeptide of SEQ ID NO: 54, or a variant thereof having at least 90% identity with SEQ ID NO: 54, wherein the variant does not vary at positions 817, 892, 899, 942, 986 and 987; or (c) the S6P3F polypeptide of SEQ ID NO: 56, or a variant thereof having at least 90% identity with SEQ ID NO: 56, wherein the variant does not vary at positions 682, 683, 685, 817, 892, 899, 942, 986 and 987; or (d) the S6PΔF polypeptide of SEQ ID NO: 58, or a variant thereof having at least 90% identity with SEQ ID NO: 58, wherein the variant does not vary at positions 806, 881, 888, 931, 975 and 976; or (e) the SCCPP polypeptide of SEQ ID NO: 60, or a variant thereof having at least 90% identity with SEQ ID NO: 60, wherein the variant does not vary at positions 383, 985, 986 and 987; or (f) the SCC6P polypeptide of SEQ ID NO: 62, or a variant thereof having at least 90% identity with SEQ ID NO: 62, wherein the variant does not vary at positions 383, 817, 892, 899, 942, 985, 986 and 987; or (g) the S_{MVopt}2P polypeptide of SEQ ID NO: 5, or a variant thereof having at least 90% identity with SEQ ID NO: 5, wherein the variant does not vary at positions 986 and 987; or (h) the S_{MVopt}ΔF polypeptide of SEQ ID NO: 65, or a variant thereof having at least 90% identity with SEQ ID NO: 65; or (i) the S_{MVopt}2PΔF polypeptide of SEQ ID NO: 47, or a variant thereof having at least 90% identity with SEQ ID NO: 47, wherein the variant does not vary at positions 975 and 976; or (j) the S_{MVopt}6P polypeptide, or a variant thereof having at least 90% identity with the S_{MVopt}6P polypeptide, wherein the variant does not vary at positions 817, 892, 899, 942, 986 and 987; or (k) the S_{MVopt}6PΔF polypeptide, or a variant thereof having at least 90% identity with the S_{MVopt}6PΔF polypeptide, wherein the variant does not vary at positions 806, 881, 888, 931, 975 and 976; or (l) the S_{MVopt}6P3F polypeptide, or a variant thereof having at least 90% identity with the S_{MVopt}6P3F polypeptide, wherein the variant does not vary at positions 682, 683, 685, 817, 892, 899, 942, 986 and 987. In some embodiments, the mutated antigen is (a) the TA-S2P3F polypeptide of SEQ ID NO: 52; or (b) the S6P polypeptide of SEQ ID NO: 54, or (c) the S6P3F polypeptide of SEQ ID NO: 56, or (d) the S6PΔF polypeptide of SEQ ID NO: 58, or (e) the SCCPP polypeptide of SEQ ID NO: 60, or (f) the SCC6P polypeptide of SEQ ID NO: 62, or (g) the S_{MVopt}2P polypeptide of SEQ ID NO: 5, or (h) the S_{MVopt}ΔF polypeptide of SEQ ID NO: 65 or (i) the S_{MVopt}2PΔF polypeptide of SEQ ID NO: 47.

[0584] In some embodiments, the SARS-CoV-2 antigenic polypeptide is a dual domain S protein of SARS-CoV-2. In some embodiments, the dual domain S protein of SARS-CoV-2 antigenic polypeptide comprises an insertion, substitution, or deletion in the 11 amino acid residue sequence of the S protein aligned with positions 1263 to 1273 of the amino acid sequence of SEQ ID NO: 3, wherein the insertion, substitution, or deletion increases cell surface expression of the dual domain S protein. In some embodiments, the dual domain S protein further comprises one or more additional substitutions that maintain the expressed dual domain S protein in its prefusion conformation. In some embodiments, the dual domain S protein further comprises the amino acid mutations K986P and V987P of SEQ ID NO: 3. In some embodiments, the dual domain protein is (a) a prefusion-stabilized SF-2P-dER polypeptide of SEQ ID NO: 76, or a variant thereof having at least 90% identity with SEQ ID NO: 76, wherein the variant does not vary at positions 986 and 987; or (b) a prefusion-stabilized SF-2P-2a polypeptide of SEQ ID NO: 82, or a variant thereof having at least having at least 90% identity with SEQ ID NO: 82, wherein the variant does not vary at positions 986, 987, 1269, and 1271. In some embodiments, the dual domain S protein is (a) a prefusion-stabilized SF-2P-dER polypeptide of SEQ ID NO: 76; or (b) a prefusion-stabilized SF-2P-2a polypeptide of SEQ ID NO: 82.

[0585] In some embodiments, the dual domain S protein of SARS-CoV-2 antigenic polypeptide further comprises a deletion of the amino acid residues at positions 69 and 70 of the amino acid sequence of SEQ ID NO: 3. In some embodiments, the dual domain S protein of SARS-CoV-2 antigenic polypeptide further comprises a deletion of the amino acid residues at positions 144 and 145 of the amino acid sequence of SEQ ID NO: 3. In some embodiments, the dual domain S protein of SARS-CoV-2 antigenic polypeptide further comprises the amino acid mutation N501Y of SEQ ID NO: 3. In some embodiments, the dual domain S protein of SARS-CoV-2 antigenic polypeptide further comprises the amino acid mutation A570D of SEQ ID NO: 3. In some embodiments, the dual domain S protein of SARS-CoV-2 antigenic polypeptide further comprises the amino acid mutation P681H of SEQ ID NO: 3. In some embodiments, the dual domain S protein of SARS-CoV-2 antigenic polypeptide further comprises the amino acid mutation T7161 of SEQ ID NO: 3. In some embodiments, the dual domain S protein of SARS-CoV-2 antigenic polypeptide further comprises the amino acid mutation S982A of SEQ ID NO: 3. In some embodiments, the dual domain S protein of SARS-CoV-2 antigenic polypeptide further comprises the amino acid mutation D1118H of SEQ ID NO: 3. In some embodiments, the dual domain S protein of SARS-CoV-2 antigenic polypeptide further comprises the amino acid mutation E484K of SEQ ID NO: 3. In some embodiments, the dual domain S protein of SARS-CoV-2 antigenic polypeptide further comprises the amino acid mutation K417N of SEQ ID NO: 3. In some embodiments, the dual domain S protein of SARS-CoV-2 antigenic polypeptide further comprises the amino acid mutation K417T of SEQ ID NO: 3. In some embodiments, the dual domain S protein of SARS-CoV-2 antigenic polypeptide further comprises the amino acid mutation D614G of SEQ ID NO: 3.

[0586] In some embodiments of the foregoing method, the coronavirus antigenic polypeptide or an immunogenic fragment thereof comprises or consists of at least one polypeptide of SARS-CoV-2 selected from the group consisting of: nucleocapsid (N) polypeptide or a variant thereof having at least 90% identity with the N polypeptide; matrix (M) polypeptide or a variant thereof having at least 90% identity with M polypeptide; E polypeptide or a variant thereof having at least 90% identity with E polypeptide; 8a polypeptide or a variant thereof having at least 90% identity with 8a polypeptide; 7a polypeptide or a variant thereof having at least 90% identity with 7a polypeptide; 3A polypeptide or a variant thereof having at least 90% identity with 3 polypeptide.

[0587] Prophylactic and Therapeutic Compositions

[0588] A prophylactically effective dose is a therapeutically effective dose that prevents infection with the virus at a clinically acceptable level. In some embodiments the therapeutically effective dose is a dose listed in a package insert for the vaccine.

[0589] Provided herein are compositions (e.g., pharmaceutical compositions), methods, kits and reagents for prevention, treatment or diagnosis of coronavirus infection, particularly SARS-CoV-2 infection, in humans and other mammals, for example. Coronavirus compositions can be used as prophylactic or therapeutic agents. They may be used in medicine to prevent and/or treat infectious disease. In some embodiments, the compositions of the present disclosure are used for the priming of immune effector cells, for example, to activate peripheral blood mononuclear cells (PBMCs) ex vivo, which are then infused (re-infused) into a subject. In some embodiments, compositions in accordance with the present disclosure may be used for treatment of coronavirus infection, particularly SARS-CoV-2.

[0590] Immunogenic compositions may be administered prophylactically or therapeutically as part of an active immunization scheme to healthy individuals or early in infection during the incubation phase or during active infection after onset of symptoms. In some embodiments, the amount of immunogenic composition of the present disclosure provided to a cell, a tissue or a subject may be an amount effective for immune prophylaxis.

[0591] Immunogenic compositions of the present disclosure may be administered with other prophylactic or therapeutic compounds. As a non-limiting example, a prophylactic or therapeutic compound may be an adjuvant or a booster. A booster (or booster vaccine) may be given after an earlier administration of the prophylactic composition. The time of administration between the initial administration of the prophylactic composition and the booster may be, but is not limited to, 1 minute, 2 minutes, 3 minutes, 4 minutes, 5 minutes, 6 minutes, 7 minutes, 8 minutes, 9 minutes, 10 minutes, 15 minutes, 20 minutes 35 minutes, 40 minutes, 45 minutes, 50 minutes, 55 minutes, 1 hour, 2 hours, 3 hours, 4 hours, 5 hours, 6 hours, 7 hours, 8 hours, 9 hours, 10 hours, 11 hours, 12 hours, 13 hours, 14 hours, 15 hours, 16 hours, 17 hours, 18 hours, 19 hours, 20 hours, 21 hours, 22 hours, 23 hours, 1 day, 36 hours, 2 days, 3 days, 4 days, 5 days, 6 days, 1 week, 10 days, 2 weeks, 3 weeks, 1 month, 2 months, 3 months, 4 months, 5 months, 6 months, 7 months, 8 months, 9 months, 10 months, 11 months, 1 year, 18 months, 2 years, 3 years, 4 years, 5 years, 6 years, 7 years, 8 years, 9 years, 10 years, 11 years, 12 years, 13 years, 14 years, 15 years, 16 years, 17 years, 18 years, 19 years, 20 years, 25 years, 30 years, 35 years, 40 years, 45 years, 50 years, 55 years, 60 years, 65 years, 70 years, 75 years, 80 years, 85 years, 90 years, 95 years or more than 99 years. In some embodiments, the time of administration between the initial administration of the prophylactic composition and the booster may be, but is not limited to, 1 week, 2 weeks, 3 weeks, 1 month, 2 months, 3 months, 6 months, or 1 year.

[0592] In some embodiments, immunogenic compositions of this disclosure may be administered intramuscularly or intradermally. In some embodiments, immunogenic compositions are administered intramuscularly.

[0593] Immunogenic compositions of this disclosure may be utilized in various settings depending on the prevalence of the infection or the degree or level of unmet medical need.

[0594] Vaccines have superior properties in that they produce much larger antibody titers and/or cellular immune responses, and produce responses earlier than commercially available anti-viral agents/compositions.

[0595] Provided herein are pharmaceutical compositions comprising a recombinant measles virus of this disclosure and/or a recombinant VLP of this disclosure, optionally in combination with one or more pharmaceutically acceptable excipients. The immunogenic composition may comprise a suitable vehicle for administration e.g. a pharmaceutically acceptable vehicle to a host, especially a human host and may further comprise but not necessarily adjuvant to enhance immune response in a host. Pharmaceutically acceptable vehicles useful in the compositions of the invention include any compatible agent that is nontoxic to patients at the dosages and concentrations employed, such as water, saline, dextrose, glycerol, ethanol, buffers, and the like, and combinations thereof. The vehicle may also contain additional components such as a stabilizer, a solubilizer, a tonicity modifier, such as NaCl, MgCl₂, or CaCl₂ etc., a surfactant, and mixtures thereof. The inventors have indeed shown that the administration of the active ingredients of the invention may elicit an immune response without the need for an external adjuvant. In some embodiments, immunogenic compositions disclosed herein do not include an adjuvant (they are adjuvant free).

[0596] Such a vaccine composition comprises advantageously active principles (active ingredients) which comprise recombinant infectious replicating MV-CoV particles rescued from the vector and constructs as defined herein optionally associated with VLPs comprising the same CoV proteins.

[0597] The administration scheme and dosage regime may require a unique administration of a selected dose of the recombinant infectious replicating MV-CoV particles according to the invention in association with the above-mentioned CoV proteins, in particular in association with CoV-VLPs expressing the same CoV proteins.

[0598] Alternatively it may require administration of multiple doses.

[0599] In a particular embodiment the administration is performed in accordance with a prime-boost regimen. Priming and boosting may be achieved with identical active ingredients consisting of the recombinant infectious replicating MV-CoV particles in association with the above-mentioned CoV proteins, in particular in association with CoV-VLPs expressing the same CoV proteins.

[0600] Alternatively priming and boosting administration may be achieved with different active ingredients, involving the recombinant infectious replicating MV-CoV particles in association with the above-mentioned CoV proteins, in particular in association with CoV-VLPs expressing the same CoV proteins, in at least one of the administration steps and other active immunogens of CoV, such as the above-mentioned CoV polypeptides or CoV-VLPs expressing the same CoV proteins, in other administration steps.

[0601] Administration of recombinant infectious replicating MV-CoV particles according to the invention in association with CoV-VLPs expressing the same CoV proteins elicits an immune response and may elicit antibodies that are cross-reactive for various CoV strains. Accordingly, administration of the active ingredients according to the invention, when prepared with the coding sequences of a particular strain of CoV, may elicit an immune response against a group of strains of CoV.

[0602] Considering that the currently known doses for human MV vaccines are in the range of 10³ to 10⁵ TCID50, a suitable dose of recombinant MV-CoV to be administered may be in the range of 0.1 to 10 ng, in particular 0.2 to 6 ng, and in some embodiments as low as 0.2 to 2 ng.

[0603] According to a particular embodiment of the invention, the immunogenic or vaccine composition defined herein may also be used for protection against an infection by the measles virus.

[0604] The invention also relates to a method for preventing a coronavirus virus related disease, in particular a disease related to infection by SARS-CoV-2, i.e. COVID-19, the method comprising the immunization of a mammalian, especially a human, in particular a child, by the injection, in particular by subcutaneous injection, of recombinant measles virus according to the invention.

[0605] The invention also relates to a method for treating a coronavirus virus related disease, in particular a disease related to infection by SARS-CoV-2, i.e. COVID-19, the method comprising the immunization of a mammalian, especially a human, in particular a child, by the injection, in particular subcutaneous injection, of recombinant measles virus according to the invention.

[0606] Modes of Vaccine Administration

[0607] Immunogenic compositions may be administered by any route which results in a therapeutically effective outcome. These include, but are not limited, to intradermal, intramuscular, intranasal and/or subcutaneous administration. The present disclosure provides methods comprising administering immunogenic compositions to a subject in need thereof. The exact amount required will vary from subject to subject, depending on the species, age, and general condition of the subject, the severity of the disease, the particular composition, its mode of administration, its mode of activity, and the like. Immunogenic compositions are typically formulated in dosage unit form for ease of administration and uniformity of dosage. It will be understood, however, that the total daily usage of vaccine compositions may be decided by the attending physician within the scope of sound medical judgment. The specific therapeutically effective, prophylactically effective, or appropriate imaging dose level for any particular patient will depend upon a variety of factors including the disorder being treated and the severity of the disorder; the activity of the specific compound employed; the specific composition employed; the age, body weight, general health, sex and diet of the patient; the time of administration, route of administration, and rate of excretion of the specific compound employed; the duration of the treatment; drugs used in combination or coincidental with the specific compound employed; and like factors well known in the medical arts.

[0608] An immunogenic composition described herein can be formulated into a dosage form described herein, such as an intranasal, intratracheal, or injectable (e.g., intravenous, intraocular, intravitreal, intramuscular, intradermal, intracardiac, intraperitoneal, intranasal and subcutaneous).

[0609] Immunogenic Formulations and Methods of Use

[0610] Some aspects of the present disclosure provide formulations of the immunogenic composition, wherein the vaccine is formulated in an effective amount to produce an antigen specific immune response in a subject (e.g., production of antibodies specific to a coronavirus antigenic polypeptide). An “effective amount” is a dose of an immunogenic composition effective to produce an antigen-specific immune response. Also provided herein are methods of inducing an antigen-specific immune response in a subject.

[0611] In some embodiments, the antigen-specific immune response is characterized by measuring an anti-antigenic polypeptide antibody titer produced in a subject administered an immunogenic composition as provided herein. An antibody titer is a measurement of the amount of antibodies within a subject, for example, antibodies that are specific to a particular antigen (e.g., a mutated full length S protein or a mutated dual domain S protein) or epitope of an antigen. Antibody titer is typically expressed as the inverse of the greatest dilution that provides a positive result. Enzyme-linked immunosorbent assay (ELISA) is a common assay for determining antibody titers, for example.

[0612] In some embodiments, an antibody titer is used to assess whether a subject has had an infection or to determine whether immunizations are required. In some embodiments, an antibody titer is used to determine the strength of an autoimmune response, to determine whether a booster immunization is needed, to determine whether a previous vaccine was effective, and to identify any recent or prior infections. In accordance with the present disclosure, an antibody titer may be used to determine the strength of an immune response induced in a subject by the immunogenic composition.

[0613] The invention also relates to a nucleic acid molecule that encodes a polypeptide of SARS-CoV-2 and which has been modified with respect to the native sequence. In particular the invention relates to the nucleic acid molecule comprising or consisting of a polynucleotide of sequence as disclosed in Table 1.

TABLE 1
Spike Polypeptides of SARS-CoV-2

| Construct | SEQ ID NO |
|---|---|
| S polypeptide of nCoV (i.e. | SEQ ID NO: 1 or SEQ ID NO: 2 |
| SARS-CoV-2) | |
| stab-S polypeptide of nCoV (i.e. | SEQ ID NO: 4 |
| SARS-CoV-2) | |
| (also named S2P polypeptide of | |
| nCoV (i.e. SARS-CoV-2)) | |
| Secto polypeptide of nCoV (i.e. | SEQ ID NO: 6 |
| SARS-CoV-2) | |
| stab-Secto polypeptide of nCoV | SEQ ID NO: 8 |
| (i.e. SARS-CoV-2) | |
| S1 polypeptide of nCoV (i.e. | SEQ ID NO: 10 |
| SARS-CoV-2) | |
| S2 polypeptide of nCoV (i.e. | SEQ ID NO: 12 |
| SARS-CoV-2) | |
| stab-S2 polypeptide of nCoV | SEQ ID NO: 14 |
| (i.e. SARS-CoV-2) | |
| tri-Secto polypeptide of nCoV | SEQ ID NO: 16 |
| (i.e. SARS-CoV-2) | |
| tristab-Secto polypeptide of | SEQ ID NO: 18 |
| nCoV (i.e. SARS-CoV-2) | |
| S3F polypeptide of nCoV (i.e. | SEQ ID NO: 42 |
| SARS-CoV-2) | |
| S2P3F polypeptide of nCoV (i.e. | SEQ ID NO: 44 |
| SARS-CoV-2) | |
| S2PΔF polypeptide of nCoV (i.e. | SEQ ID NO: 46 |
| SARS-CoV-2) | |
| S2PΔF2A polypeptide of nCoV | SEQ ID NO: 48 |
| (i.e. SARS-CoV-2) | |
| T4-S2P3F polypeptide of SARS- | SEQ ID NO: 51 |
| CoV-2 (also named tristab- | |
| Secto-3F) | |
| S6P polypeptide of SARS-CoV-2 | SEQ ID NO: 53 |
| S6P3F polypeptide of SARS- | SEQ ID NO: 55 |
| CoV-2 | |
| S6PΔF polypeptide of SARS- | SEQ ID NO: 57 |
| CoV-2 | |
| SCCPP polypeptide of SARS- | SEQ ID NO: 59 |
| CoV-2 | |
| SCC6P polypeptide of SARS- | SEQ ID NO: 61 |
| CoV-2 | |
| S_{MVopt}2P polypeptide of SARS- | SEQ ID NO: 63 |
| CoV-2 | |
| S_{MVopt}ΔF polypeptide of SARS- | SEQ ID NO: 64 |
| CoV-2 | |
| S_{MVopt}2PΔF polypeptide of | SEQ ID NO: 66 |
| SARS-CoV-2 | |
| SF-dER of nCoV (i.e. SARS- | SEQ ID NO: 73 |
| CoV-2) | |
| SF-2P-dER of nCoV (i.e. | SEQ ID NO: 75 |
| SARS-CoV-2) | |
| S2-dER of nCoV (i.e. SARS- | SEQ ID NO: 77 |
| CoV-2) | |
| S2-2P-dER of nCoV (i.e. | SEQ ID NO: 79 |
| SARS-CoV-2) | |
| SF-2P-2a of nCoV (i.e. SARS- | SEQ ID NO: 81 |
| CoV-2) | |

[0614] The invention also concerns the plasmids disclosed in Table 2.

TABLE 2
Measles Virus Plasmids encoding SARS-CoV-2 Spike protein

| Plasmid | SEQ ID NO |
|---|---|
| pKP-MVSchw | SEQ ID NO: 30 |
| pKP-MVSchw-ATU1(eGFP) | SEQ ID NO: 31 |
| pKP-MVSchw-ATU2(eGFP) | SEQ ID NO: 32 |
| pKP-MVSchw-ATU3(eGFP) | SEQ ID NO: 33 |
| pKM-ATU2-S_2019-nCoV (i.e. SARS-CoV-2) | SEQ ID NO: 34 |
| (optimized sequence) | |
| pKM-ATU3-S_2019-nCoV (i.e. SARS-CoV-2) | SEQ ID NO: 35 |
| (optimized sequence) | |
| pTM2-SF-dER_SARS-CoV-2 (optimized | SEQ ID NO: 144 |
| sequence) | |
| pTM2-S2-dER_SARS-CoV-2 (optimized | SEQ ID NO: 145 |
| sequence) | |
| pTM2-SF-2P-dER_SARS-CoV-2 (optimized | SEQ ID NO: 146 |
| sequence) | |
| pTM2-S2-2P-dER_SARS-CoV-2 (optimized | SEQ ID NO: 147 |
| sequence) | |
| pTM2-SF-2P-2a_SARS-CoV-2 (optimized | SEQ ID NO: 148 |
| sequence) | |

[0615] In a particular aspect the invention relates to the plasmid pKP-MVSchwarz deposited under No. CNCM I-5493 on Feb. 12, 2020 or the plasmid pKP-MVSchw having the sequence of SEQ ID NO:30. This plasmid may be used as plasmid for cloning any polynucleotide.

[0616] In another particular aspect the invention relates to the plasmid pTM-MVSchw deposited under No. CNCM I-2889 on Jun. 12, 2002 (or having the sequence of SEQ ID NO: 28), or the plasmid pTM2-MVSchw-gfp deposited under No. CNCM I-2890 on Jun. 12, 2002 (or having the sequence of SEQ ID NO: 29), or the plasmid pTM3-MVSchw-gfp having the sequence of SEQ ID NO: 38, preferably the plasmid pTM2-MVSchw-gfp deposited under No. CNCM I-2890 on Jun. 12, 2002 (or having the sequence of SEQ ID NO: 29). This plasmid may be used as plasmid for cloning any polynucleotide.

TABLE 3
Native and codon/MV-optimized nucleotide sequences of the polynucleotide
encoding particular peptides/proteins as well as amino acid sequences
of these peptides/proteins used in the invention.

| | | SEQ ID NO | SEQ ID NO | |
|---|---|---|---|---|
| | SEQ ID NO | of the codon- | of the MV- | |
| | of the native | optimized | optimized | |
| | nucleotide | nucleotide | nucleotide | SEQ ID NO |
| | sequence of the | sequence of the | sequence of the | of the amino |
| Name of the compound, i.e. | polynucleotide | polynucleotide | polynucleotide | acid sequence |
| peptide/protein/antigen | encoding the | encoding the | encoding the | of the |
| (abbreviation) | compound | compound | compound | compound |
| S polypeptide of nCoV (i.e. SARS- | 1 | 2 | 36 | 3 |
| CoV-2) | | | | |
| stab-S polypeptide of nCoV (i.e. | | 4 | | 5 |
| SARS-CoV-2) | | | | |
| (also named S2P polypeptide of | | | | |
| nCoV (i.e. SARS-CoV-2)) | | | | |
| Secto polypeptide of nCoV (i.e. | | 6 | | 7 |
| SARS-CoV-2) | | | | |
| stab-Secto polypeptide of nCoV | | 8 | | 9 |
| {i.e. SARS-CoV-2) | | | | |
| S1 polypeptide of nCoV (i.e. SARS- | | 10 | | 11 |
| CoV-2) | | | | |
| S2 polypeptide of nCoV (i.e. SARS- | | 12 | | 13 |
| CoV-2) | | | | |
| stab-S2 polypeptide of nCoV (i.e. | | 14 | | 15 |
| SARS-CoV-2) | | | | |
| tri-Secto polypeptide of nCoV {i.e. | | 16 | | 17 |
| SARS-CoV-2) | | | | |
| tristab-Secto polypeptide of nCoV | | 18 | | 19 |
| {i.e. SARS-CoV-2) | | | | |
| N polypeptide of nCoV (i.e. SARS- | 20 | 21 | 37 | 22 |
| CoV-2) | | | | |
| E polypeptide of nCoV (i.e. SARS- | | | | 23 |
| CoV-2) | | | | |
| M polypeptide of nCoV (i.e. SARS- | | | | 24 |
| CoV-2) | | | | |
| ORF8 polypeptide of nCoV (i.e. | | | | 25 |
| SARS-CoV-2) | | | | |
| ORF3a polypeptide of nCoV (i.e. | | | | 26 |
| SARS-CoV-2) | | | | |
| ORF7a polypeptide of nCoV (i.e. | | | | 27 |
| SARS-CoV-2) | | | | |
| S3F polypeptide of nCoV (i.e. SARS- | | 42 | | 43 |
| CoV-2) | | | | |
| S2P3F polypeptide of nCoV (i.e. | | 44 | | 45 |
| SARS-CoV-2) | | | | |
| S2PΔF polypeptide of nCoV (i.e. | | 46 | | 47 |
| SARS-CoV-2) | | | | |
| S2PΔF2A polypeptide of nCoV (i.e. | | 48 | | 49 |
| SARS-CoV-2) | | | | |
| T4-S2P3F polypeptide of SARS-CoV- | | 51 | | 52 |
| 2 (also named tristab-Secto-3F | | | | |
| polypeptide of SARS-CoV-2) | | | | |
| S6P polypeptide of SARS-CoV-2 | | 53 | | 54 |
| S6P3F polypeptide of SARS-CoV-2 | | 55 | | 56 |
| S6PΔF polypeptide of SARS-CoV-2 | | 57 | | 58 |
| SCCPP polypeptide of SARS-CoV-2 | | 59 | | 60 |
| SCC6P polypeptide of SARS-CoV-2 | | 61 | | 62 |
| S_{MVopt}2P polypeptide of SARS-CoV-2 | | | 63 | 5 |
| S_{MVopt}ΔF polypeptide of SARS-CoV-2 | | | 64 | 65 |
| S_{MVopt}2PΔF polypeptide of SARS- | | | 66 | 47 |
| CoV-2 | | | | |
| SF-dER of nCoV (i.e. SARS-CoV-2) | | 73 | | 74 |
| SF-2P-dER of nCoV (i.e. SARS-CoV-2) | | 75 | | 76 |
| S2-dER of nCoV (i.e. SARS-CoV-2) | | 77 | | 78 |
| S2-2P-dER of nCoV (i.e. SARS-CoV-2) | | 79 | | 80 |
| SF-2P-2a of nCoV (i.e. SARS-CoV-2) | | 81 | | 82 |

TABLE 4
Transfer Vector Plasmid and elements.

| Name of the transfer vector plasmid and elements | SEQ ID NO |
|---|---|
| pTM-MVSchw | 28 |
| pTM2-MVSchw-gfp | 29 |
| pKP-MVSchw | 30 |
| pKP-MVSchw-ATU1(eGFP) | 31 |
| pKP-MVSchw-ATU2(eGFP) | 32 |
| pKP-MVSchw-ATU3(eGFP) | 33 |
| pKM-ATU2-S_2019-nCoV (i.e. SARS-CoV-2) | 34 |
| (optimized sequence) | |
| pKM-ATU3-S_2019-nCoV (i.e. SARS-CoV-2) | 35 |
| (optimized sequence) | |
| pTM3-MVSchw-gfp | 38 |
| ATU1(eGFP) | 39 |
| ATU2(eGFP) | 40 |
| ATU3(eGFP) | 41 |

[0617] The disclosed sequences are further characterized by the following annotations relating to the nucleotide or amino acid residues:

[0618] The invention also concerns recombinant virus like particles (VLPs) comprising a S polypeptide or an immunogenic fragment thereof that has 1, 2, 3 or more amino acid substitution(s), insertion(s) or deletion(s), which is(are) encoded by the first and optionally the second heterologous polynucleotide(s) of the nucleic acid construct according to the invention, or of the transfer plasmid vector according to the invention, or the recombinant measles virus according to the invention or is produced within the host cell according to the invention.

[0619] In accordance with the present invention, VLPs can be produced in large quantities and are expressed together with recombinant infectious MV-CoV particles. The VLPs are VLPs of CoV.

[0620] According to a preferred embodiment of the invention, the recombinant MV vector is designed in such a way and the production process involves cells such that the virus particles produced in helper cells transfected or transformed with the vector, originated from a MV strain adapted for vaccination, enable the production of recombinant infectious replicating MV and the production of CoV-VLPs for use in immunogenic compositions, preferably protective or vaccine compositions.

[0621] Advantageously, the genome of the recombinant infectious MV-CoV particles of the invention is replication competent. By “replication competent’, it is meant a nucleic acid, which when transduced into a helper cell line expressing the N, P and L proteins of a MV, is able to be transcribed and expressed in order to produce new viral particles.

[0622] Replication of the recombinant virus of the invention obtained using MV cDNA for the preparation of the recombinant genome of MV-CoV can also be achieved in vivo in the host, in particular the human host to which recombinant MV-CoV is administered.

[0623] The invention also relates to a polypeptide of a coronavirus (CoV), in particular of SARS-CoV-2, encoded by the nucleic acid molecule according to the invention.

[0624] In a particular embodiment of the invention, the polypeptide has an amino acid sequence selected from the group consisting of:
[0625] i. SEQ ID NO: 3 (construct S);
[0626] ii. SEQ ID NO: 5 (construct stab-S);
[0627] iii. SEQ ID NO: 7 (construct Secto);
[0628] iv. SED ID NO: 9 (construct stab-Secto);
[0629] v. SEQ ID NO: 11 (construct S1),
[0630] vi. SEQ ID NO: 13 (construct S2),
[0631] vii. SEQ ID NO: 15 (construct stab-S2),
[0632] viii. SEQ ID NO: 17 (construct tri-Secto),
[0633] ix. SEQ ID NO: 19 (construct tristab-Secto),
[0634] x. SEQ ID NO: 43 (construct S3F),
[0635] xi. SEQ ID NO: 45 (construct S2P3F),
[0636] xii. SEQ ID NO: 47 (construct S2PΔF),
[0637] xiii. SEQ ID NO: 49 (construct S2PΔF2A),
[0638] xiv. SEQ ID NO: 22 (construct N),
[0639] xv. SEQ ID NO: 52 (construct T4-S2P3F (tristab-Secto-3F)),
[0640] xvi. SEQ ID NO: 54 (construct S6P),
[0641] xvii. SEQ ID NO: 56 (construct S6P3F),
[0642] xviii. SEQ ID NO: 58 (construct S6PΔF),
[0643] xix. SEQ ID NO: 60 (construct SCCPP), and
[0644] xx. SEQ ID NO: 62 (construct SCC6P),
   preferably the polypeptide has an amino acid sequence selected from the group consisting of SEQ ID NO: 5, SEQ ID NO: 43, SEQ ID NO: 45, SEQ ID NO: 47 and SEQ ID NO: 49, more preferably an amino acid sequence selected from the group consisting of SEQ ID NO: 45, SEQ ID NO: 47 and SEQ ID NO: 49, even more preferably the polypeptide of SEQ ID NO: 47 or SEQ ID NO: 49.

[0645] In a preferred embodiment of the invention, the polypeptide has an amino acid sequence of SEQ ID NO: 76 (construct SF-2P-dER) or SEQ ID NO: 82 (construct SF-2P-2a), preferably an amino acid sequence of SEQ ID NO: 76 (construct SF-2P-dER).

[0646] The present invention also relates to a recombinant protein expressed by the transfer vector according to the invention.

[0647] In a particular embodiment of the invention, the recombinant protein further comprises an amino acid tag for purification.

[0648] The present invention also relates to a recombinant protein expressed in vitro or in vivo by the transfer vector according to the invention.

[0649] The invention also relates to the in vitro use of an antigen of SARS-CoV-2 which is the spike antigen or an immunogenic fragment thereof that has 1, 2, 3 or more amino acid substitution(s), insertion(s) or deletion(s), in particular an antigen having the sequence of SEQ ID NO: 3, 5, 7, 9, 11, 13, 15, 17, 19, 22, 23, 24, 25, 26, 27, 43, 45, 47 or 49, preferably of SEQ ID NO: 3, 5, 43, 45, 47 or 49, more preferably of SEQ ID NO: 45, 47 or 49, even more preferably of SEQ ID NO: 47 or 49, even more preferably of SEQ ID NO: 49, for the detection in a biological sample, especially a blood or a serum sample previously obtained from an individual suspected of being infected by a coronavirus, in particular by SARS-CoV-2, wherein the antigen is contacted with the biological sample to determine the presence of antibodies against the antigen.

[0650] Preferably, the in vitro use of an antigen of SARS-CoV-2 is the spike antigen or the immunogenic fragment thereof or the mutated antigen thereof as defined above, in particular an antigen having the sequence of SEQ ID NOs: 3, 5, 7, 9, 11, 13, 15, 17, 19, 22, 23, 24, 25, 26, 27, 43, 45, 47, 49, 52, 54, 56, 58, 60, 62 or 65, preferably an antigen having the sequence of SEQ ID NOs: 3, 5, 43, 45, 47 or 49, more preferably an antigen of SEQ ID NO: 49, for the detection in a biological sample, especially a blood or a serum sample previously obtained from an individual suspected of being infected by SARS-CoV-2, wherein the antigen is contacted with the biological sample to determine the presence of antibodies against the antigen.

[0651] The invention also relates to the in vitro use of an antigen of SARS-CoV-2 which is the spike antigen or an immunogenic fragment thereof that has 1, 2, 3 or more amino acid substitution(s), insertion(s) or deletion(s), in particular an antigen having the sequence of SEQ ID NO: 3, 5, 7, 9, 11, 13, 15, 17, 19, 22, 23, 24, 25, 26 or 27, preferably of SEQ ID NO: 3 or 5, for the detection in a biological sample, especially a blood or a serum sample previously obtained from an individual suspected of being infected by a coronavirus, in particular by SARS-CoV-2, wherein the antigen is contacted with the biological sample to determine the presence of antibodies against the antigen.

[0652] Preferably, the In vitro use of the antigen of SARS-CoV-2 is the SF-2P-dER antigen or the SF-2P-2a antigen or an immunogenic fragment thereof that has 1, 2, 3 or more amino acid substitution(s), insertion(s) and/or deletion(s), in particular an antigen having the sequence of SEQ ID NO: 76 or SEQ ID NO: 82, preferably an antigen having the sequence of SEQ ID NO: 76, for the detection in a biological sample, especially a blood or a serum sample previously obtained from an individual suspected of being infected by SARS-CoV-2, wherein the antigen is contacted with the biological sample to determine the presence of antibodies against the antigen.

[0653] The invention also relates to the in vitro use of an antigen of SARS-CoV-2 which is the spike antigen or an immunogenic fragment thereof that has 1, 2, 3 or more amino acid substitution(s), insertion(s) or deletion(s), in particular an antigen having the sequence of SEQ ID NO: 3, 5, 7, 9, 11, 13, 15, 17, 19, 22, 23, 24, 25, 26, 27, 43, 45, 47 or 49, preferably of SEQ ID NO: 3, 5, 43, 45, 47 or 49, more preferably of SEQ ID NO: 45, 47 or 49, even more preferably of SEQ ID NO: 47 or 49, even more preferably of SEQ ID NO: 49, for diagnosis or vaccine purposes, or as a pre-fusion configuration.

[0654] A method for in vitro diagnosing a coronavirus, in particular coronavirus SARS-CoV-2, comprising the use of an antigen of SARS-CoV-2 which is the spike antigen or an immunogenic fragment thereof that has 1, 2, 3 or more amino acid substitution(s), insertion(s) or deletion(s), in particular an antigen having the sequence of SEQ ID NO: 3, 5, 7, 9, 11, 13, 15, 17, 19, 22, 23, 24, 25, 26, 27, 43, 45, 47 or 49, preferably of SEQ ID NO: 3, 5, 43, 45, 47 or 49, more preferably of SEQ ID NO: 45, 47 or 49, even more preferably of SEQ ID NO: 47 or 49, even more preferably of SEQ ID NO: 49.

[0655] The invention also relates to the in vitro use of an antigen of SARS-CoV-2 which is the spike antigen or an immunogenic fragment thereof that has 1, 2, 3 or more amino acid substitution(s), insertion(s) or deletion(s), in particular an antigen having the sequence of SEQ ID NO: 3, 5, 7, 9, 11, 13, 15, 17, 19, 22, 23, 24, 25, 26 or 27, preferably of SEQ ID NO: 3 or 5, for the detection in a biological sample, especially a blood or a serum sample previously obtained from an individual suspected of being infected by a coronavirus, in particular by SARS-CoV-2, wherein the antigen is contacted with the biological sample to determine the presence of antibodies against the antigen.

[0656] Preferably, the In vitro use of the antigen of SARS-CoV-2 is the SF-2P-dER antigen or the SF-2P-2a antigen or an immunogenic fragment thereof that has 1, 2, 3 or more amino acid substitution(s), insertion(s) and/or deletion(s), in particular an antigen having the sequence of SEQ ID NO: 76 or SEQ ID NO: 82, preferably an antigen having the sequence of SEQ ID NO: 76, for the detection in a biological sample, especially a blood or a serum sample previously obtained from an individual suspected of being infected by SARS-CoV-2, wherein the antigen is contacted with the biological sample to determine the presence of antibodies against the antigen.

[0657] In a particular embodiment of the invention, the antigen is placed in contact with a biological sample, especially a blood or a serum sample previously obtained from an individual suspected of being infected by a coronavirus, in particular by SARS-CoV-2, and the presence of antibodies against the antigen is determined.

[0658] The invention also relates to a method for treating or preventing an infection by SARS-CoV-2 in a host, in particular a human host, comprising administering the immunogenic or vaccine composition according to the invention to the host.

[0659] The invention also relates to a method for inducing a protective immune response against SARS-CoV-2 in a host, in particular a human host, comprising administering the immunogenic or vaccine composition according to the invention to the host.

[0660] In a particular embodiment of the methods, the administration comprises at least two successive administration steps. Preferably, the second administration is performed from two weeks up to 6 months after the first administration, in particular one or two months after the first administration.

### Antigens/Antigenic Polypeptides

[0661] In some embodiments, an antigenic polypeptide includes gene products, naturally occurring polypeptides, synthetic polypeptides, homologs, orthologs, paralogs, fragments and other equivalents, variants, and analogs of the foregoing. A polypeptide may be a single molecule or may be a multi-molecular complex such as a dimer, trimer or tetramer. Polypeptides may also comprise single chain polypeptides or multichain polypeptides, and may be associated or linked to each other. Most commonly, disulfide linkages are found in multichain polypeptides. The term “polypeptide” may also apply to amino acid polymers in which at least one amino acid residue is an artificial chemical analogue of a corresponding naturally-occurring amino acid.

[0662] As recognized by those skilled in the art, protein fragments, functional protein domains, and homologous proteins are also considered to be within the scope of polypeptides of interest. For example, provided herein is any protein fragment (meaning a polypeptide sequence at least one amino acid residue shorter than a reference polypeptide sequence but otherwise identical) of a reference protein having a length of 10, 20, 30, 40, 50, 60, 70, 80, 90, 100 or longer than 100 amino acids. In another example, any protein that comprises a stretch of 20, 30, 40, 50, or 100 (contiguous) amino acids that are 40%, 50%, 60%, 70%, 80%, 90%, 95%, 96%, 97%, 98%, 99% or 100% identical to any of the sequences described herein can be utilized in accordance with the disclosure. In some embodiments, a polypeptide comprises 2, 3, 4, 5, 6, 7, 8, 9, 10, or more mutations as shown in any of the sequences provided herein or referenced herein. In another example, any protein that comprises a stretch of 20, 30, 40, 50, or 100 amino acids that are greater than 80%, 90%, 95%, or 100% identical to any of the sequences described herein, wherein the protein has a stretch of 5, 10, 15, 20, 25, or 30 amino acids that are less than 80%, 75%, 70%, 65% to 60% identical to any of the sequences described herein can be utilized in accordance with the disclosure.

[0663] Polypeptide or polynucleotide molecules of the present disclosure may share a certain degree of sequence similarity or identity with the reference molecules (e.g., reference polypeptides or reference polynucleotides), for example, with art-described molecules (e.g., engineered or designed molecules or wild type molecules).

[0664] Other features and advantages of the invention will be apparent from the examples which follow and will also be illustrated in the figures, none of which are intended to be limiting.

### EXAMPLES

### A. Example 1

[0665] 1. Materials and Methods

[0666] Design of Specific Antigenic Sequences of SARS-CoV-2

[0667] cDNAs encoding native spike and nucleoprotein antigens from SARS-CoV-2 were designed based on the Genbank MN908947 sequence publicly available from NBCBI on 20 Jan. 2020. These sequences were then processed through the Project Manager platform of GeneArt (ThermoFisher) to generate codon-optimized nucleotide sequences for high expression in mammalian and drosophila cells. Regions of very high (>80%) or low (<30%) GC content were avoided whenever possible, and cis-acting sequence motifs like internal TATA-boxes, chi-sites, ribosomal entry sites, ARE, INS, and CRS sequence elements, as well as repetitive sequences, RNA secondary structures and splice donor and acceptor sites, were avoided. Both sequences were further edited to remove MV editing (AnGn, n≥3)- and core gene end (A4CKT)-like sequences on both strands. BsiWI and BssHII restriction sites were then added at the 5′ and 3′ ends, respectively, of the nucleotide sequences. The resulting cDNAs respect the “rule of six”, which stipulates that the number of nucleotides of the MV genome must be a multiple of 6 and have the sequences 20AAP6IP-S-2019-nCoV (i.e. SARS-CoV-2)-opt(2×) (SEQ ID NO: 2) and 20AASUIP-N-2019-nCoV (i.e. SARS-CoV-2)-opt(2×) (SEQ ID NO: 21), respectively (see below).

[0668] The native spike and nucleoprotein sequences were also processed through the Project Manager platform of GeneArt (ThermoFisher) to generate optimized genes for the measles vaccine platform. The coding sequences were modified in order to generate sequences with a target GC composition of 44-50% and a balanced codon composition, avoiding, where applicable, rare codons and high usage of the most frequent codons. As for the generation of the fully codon-optimized sequences described above, regions of very high (>80%) or low (<30%) GC content were avoided whenever possible, and cis-acting sequence motifs like internal TATA-boxes, chi-sites, ribosomal entry sites, ARE, INS, and CRS sequence elements, as well as repetitive sequences, RNA secondary structures and splice donor and acceptor sites, were avoided. Both sequences were also further edited to remove MV editing (AnGn, n≥3)- and core gene end (A4CKT)-like sequences on both strands. BsiWI and BssHII restriction sites were then added at the 5′ and 3′ ends, respectively, of the nucleotide sequences. The resulting cDNAs respect the “rule of six”, which stipulates that the number of nucleotides of the MV genome must be a multiple of 6 and have the sequences 20AAS76C_S-2019-nCoV_mod (SEQ ID NO: 36) and 20AAS77C_N-2019-nCoV-HS_mod (SEQ ID NO: 37), respectively (see below).

[0669] The 4 resulting cDNAs were synthesized at Geneart (ThermoFisher) facilities.

[0670] Plasmid Vector Constructs and Vaccine Candidate Rescue

[0671] The MVSchw recombinant plasmid constructs have been derived from novel pKP-MVSchw-ATU1(eGFP), -ATU2 and -ATU3 plasmid vectors (abbreviated names: pKM1, pKM2, pKM3). These vectors were constructed from the original pTM-MVSchw-ATU1, -ATU2 and -ATU3 plasmid vectors, respectively (WO04/000876 and Combredet et al., J Virol, 2003). pKM and pTM plasmid vector series carry identical infectious cDNAs corresponding to the anti-genome of the Schwarz MV vaccine strain and an additional transcription unit containing unique BsiWI and BssHII restriction sites for the insertion of foreign open reading frames upstream from the N gene (ATU1), between the P and M genes (ATU2) and between the H and L genes (ATU3).

[0672] First, pKM2-eGFP was obtained by transferring the whole T7 rescue cassette of the original pTM2-eGFP plasmid (17038 bp located between the two Not1 sites) into a purposively-modified version of the commercial pENTR2 minimal plasmid (ThermoFisher). Next, pKM, pKM3-eGFP and pKM1-eGFP were sequentially derived from pKM2-eGFP. The novel pKM, pKM1-, pKM2- and pKM3-eGFP vectors were verified for their capacity to rescue the corresponding measles virus and vectors with similar efficiency to that observed for the pTM plasmid vector series. It is noteworthy to highlight that viruses rescued from the novel pKM1, pKM2 and pKM3 plasmid vectors have the same genomic sequence as viruses rescued from original pTM1, pTM2 and pTM3 vectors respectively.

[0673] pKM plasmid series are suitable for use to insert a variety of viral antigens in single, dual and triple recombinant vectors which much higher cloning efficiency, stability and DNA yield than the original pTM plasmid series, making them a most useful rescue tool for the measles vaccine platform.

[0674] cDNAs encoding the SARS-CoV-2 nucleoprotein and spike antigens described above have been inserted into BsiWI/BssHII-digested pKM2 and pKM3 vectors and the resulting pKM-nCoV plasmids are used to rescue single recombinant MV-nCoV vaccine candidates using a helper-cell-based system as previously described (Combredet et al., J Virol, 2003).

[0675] The plasmid pKM2-nCoV_NP and any of the pKM3-nCoV_Spike constructs (full length-S, stab-S, Secto, S1, tri-Secto, tristab-Secto) will be digested with SaII restriction enzyme and ligated to produce a series of double recombinant pKM-nCoV-N&S plasmids. Alternatively, double recombinant plasmids will be obtained by inserting the N and S ATU cassettes in tandem either between the P and M genes (position 3 of MV genome) or between the H and L gene (position 6 of MV genome). The resulting pKM-nCoV-N&S plasmids will be used to rescue dual recombinant MV-nCoV-N&S vaccine candidates as described above.

[0676] In Cellulo Characterization of the Vaccine Candidates

[0677] The single- and dual-recombinant vaccine candidates will be amplified on Vero-NK cells as disclosed in WO 04/000876. All viral stocks will be produced after infection at a MOI of 0.1, stored at −80° C. and titrated by an endpoint limiting dilution assay on Vero-NK cell monolayers. Infectious titers will be determined as 50% tissue culture infectious doses (TCID₅₀) according to the Reed and Munsch method (Reed et al., Am. J. Hyg., 1938).

[0678] Vaccine candidates will be characterized essentially as described for MV-SARS vaccine candidates (Escriou et al., Virology, 2014):
[0679] growth curves of vaccine candidates and parental MVSchw will be determined on Vero-NK cells infected at a MOI of 0.1,
[0680] expression level of SARS-CoV-2 antigens will be evaluated with available anti-SARS cross-reactive mouse and rabbit antibodies and anti-SARS-CoV-2 antibodies, by indirect immunofluorescence assays (IFA) performed on VeroNK-infected cells as well as by western blot on lysates prepared from infected cells,
[0681] genomic stability of the vaccine candidates will be assessed by serial passages in VeroNK cells and full genome NGS sequencing of the rescued and passaged viral stocks.

[0682] Generation of Recombinant MV Schwarz Viruses Expressing SARS-CoV-2 S Protein

[0683] Cloning of SARS-CoV-2 S Protein in Plasmids with Infectious MV cDNA

[0684] The plasmid pKM-MVSchw contains an infectious MV cDNA corresponding to the anti-genome of the Schwarz MV vaccine strain. It was derived from the previously described pTM-MVSchw (Combredet et al., J Virol, 2003). Both plasmids permit the rescue of the Schwarz MV vaccine strain. An optimized cDNA encoding the full-length, membrane-bound, native SARS-CoV2 spike glycoprotein from viruses circulating in early 2020 (publicly available) was chemically synthesized (GeneArt/ThermoFisher, Germany). The complete sequence respects the “rule of six”—which stipulates that the number of nucleotides added into the MV genome must be a multiple of six—and contains BsiWI and BssHII restriction sites at both ends. The spike nucleotide sequence was optimized both for transcription from MV vector (in particular but not limited to removal of cryptic signals and optimization of RNA primary sequence) and for translation in human cells (in particular but not limited to codon optimization and RNA secondary structure). This cDNA was inserted into BsiWI/BssHII-digested pKM-MVSchw-ATU3 which contains an additional transcription unit between the hemagglutinin and polymerase genes of the Schwarz MV genome. The resulting plasmid was named pKM-ATU3-S_2019-nCOV (i.e. SARS-CoV-2).

[0685] Starting from this plasmid, several mutations were introduced into the spike amino acid sequence (FIG. 2). The amino acid sequence was sequentially modified to lock the expressed protein in its prefusion state (2P mutation), prevent S1/S2 cleavage (furine cleavage site inactivation, either through 3F mutation or through ΔF deletion of the encompassing loop) and inactivate the Endoplasmic Reticulum retrieval signal (2A mutation). The resulting plasmids were named: pKM-ATU3-S_2019-nCOV (i.e. SARS-CoV-2), pKM-ATU3-stab S_2019-nCOV (i.e. SARS-CoV-2) (2P mutation), pKM-ATU3-S2P3F_2019-nCOV (i.e. SARS-CoV-2), pKM-ATU3-S2PΔF_2019-nCOV (i.e. SARS-CoV-2), pKM-ATU3-S2PΔF2A_2019-nCOV (i.e. SARS-CoV-2). In addition to the constructs shown in FIG. 3, pKM-ATU3-S3F_2019-nCOV was generated, lacking the 2P mutation.

[0686] Other constructs were designed to generate similar coding sequences at the ATU2 site. First, pKM-ATU2-S_2019-nCOV (i.e. SARS-CoV-2) of SEQ ID NO: 34 was generated by inserting the optimized SARS-CoV2 spike cDNA into BsiWI/BssHII-digested pKM-MVSchw-ATU2 which contains an additional transcription unit between the phosphoprotein and matrix genes of the Schwarz MV genome.

[0687] Furthermore, pKM-ATU2-S_{MVopt} was generated using a measles-optimized sequence (SEQ ID NO: 36) in an effort to fine-tune nucleotide composition and expression levels of the transgene and promote enhanced fitness and stability of the recombinant measles viruses. Starting from this plasmid, the 2P mutation, the deletion of the furin cleavage site (ΔF), and the combination of the two mutation/deletion (2PΔF) were introduced into the spike amino acid coding sequence (FIG. 3C) such as to generate similar insertions as in ATU3. The resulting plasmids were named: pKM-ATU2-S_{MVopt}, pKM-ATU2-S2P_{MVopt}, pKM-ATU2-SΔF_{MVopt}, and pKM-ATU2-S2PΔF_{MVopt}.

[0688] Seeding of HEK 293-T7-NP Cells

[0689] The helper cell line HEK 293-T7-NP (U.S. Pat. No. 8,586,364 patent) was freshly thawed and propagated. Upon reaching 90% confluency, the cells were harvested and resuspended in DMEM containing 10% FBS. Six-well plates were seeded with 2 mL cell suspension per well and incubated overnight at 37° C. and 5% CO₂.

[0690] Transfection with plasmids pKM-ATU3-S 2019-nCOV (i.e. SARS-CoV-2) of SEQ ID NO: 35, pKM-ATU2-S 2019-nCOV (i.e. SARS-CoV-2) of SEQ ID NO: 34, pKM-ATU2-Svopt or Derivatives and Heat Shock

[0691] At 50-70% confluency the medium was exchanged to fresh 2 mL DMEM+10% FCS and the plates were incubated for 4 h at 37° C. and 5% CO₂. Co-transfection of the pKM plasmid and the pEMC-La plasmid encoding Measles Schwarz polymerase was performed with calcium phosphate as previously described (Combredet et al., J Virol, 2003). The transfection mixture was added dropwise to the medium. The plates were shaken gently to distribute the transfection mix equally and incubated overnight at 37° C. and 5% CO₂.

[0692] The transfection medium was carefully replaced by 2 mL fresh DMEM+10% FCS. The transfected cells were incubated for 3 h at 37° C. followed by a 3-hour heat shock at 43.5° C. and 5% CO₂.

[0693] Incubation was subsequently continued at 37° C. for 2 days until confluence of the cell layer.

[0694] Co-Culture of HEK and VERO Cells

[0695] One day before co-cultivation, 48-well plaques were seeded with Vero cells at a concentration of 2×10⁴ cells/0.25 mL in DMEM+5% FCS. At day 3 post transfection i.e. day 0 of co-cultivation, the transfected HEK cells were gently resuspended in 2 mL of medium (contained in each well of the plates), diluted up to 24 mL and added to the Vero cells at 0.25 mL/well (co-culture). The co-culture plates were shaken gently for mixing and incubated at 37° C. and 5% CO₂. From day 3 of co-culture, the cells were observed daily for CPE and syncytium formation.

[0696] Harvest of Syncytia (Rescued Virus)

[0697] Wells of the co-culture plates showing single foci of CPE or syncytia were rinsed with PBS and harvested by trypsination (200 μl of trypsine/EDTA). Together with co-cultivation in 48-well plaques, this ensured clonality of the rescued viruses. After 2-5 minutes incubation at 37° C., the cells were transferred into a single well of a 6-well plates in a final volume of 2.5 mL of DMEM+5% FCS. Multiple wells containing single syncytia from cells transfected with the different plasmids were harvested and transferred to new 6-well plates. The 6-well plates were incubated at 37° C. and 5% CO₂ and observed daily for CPE or syncytia formation.

[0698] The rescued viruses were named:

| | | | Rescue recombinant |
|---|---|---|---|
| Plasmid | CNCM | SEQ ID NO | measles virus |
| pKM-ATU3-S_2019-nCOV | I-5497 | 35 | MV-ATU3-S |
| (i.e. SARS-CoV-2) | | | |
| pKM-ATU3-stab-S_2019- | I-5536 | | MV-ATU3-S2P |
| nCOV (i.e. SARS-CoV-2) | | | |
| pKM-ATU3-S2P3F_2019- | I-5534 | | MV-ATU3-S2P3F |
| nCOV (i.e. SARS-CoV-2) | | | |
| pKM-ATU3-S2PΔF_2019- | I-5532 | | MV-ATU3-S2PΔ |
| nCOV (i.e. SARS-CoV-2) | | | |
| pKM-ATU3-S2PΔF2A_2019- | I-5533 | | MV-AUT3-S2PΔF2A |
| nCOV (i.e. SARS-CoV-2) | | | |
| pKM-ATU3-S3F_2019- | I-5535 | | MV-ATU3-S3F |
| nCOV (i.e. SARS-CoV-2) | | | |
| pKM-ATU2-S_{MVopt}_SARS- | | | MV-ATU2-S_{MVopt} |
| CoV-2 | | | |

[0699] Expansion of Rescued Virus

[0700] When syncytia/CPE reached 30-50% of the cell monolayer, the rescued viral clones were further expanded. The cell monolayers of these wells were harvested by trypsination and transferred to a 75 cm² flask together with 2-3×10⁶ of trypsinated Vero cells originating from a T75 flask grown to confluence and incubated at 37° C. and 5% CO₂.

[0701] Harvest of the Expanded Rescued Virus

[0702] One to two days after virus expansion, syncytia/CPE reached 70-90% of the Vero cell monolayer infected with each of the rescued viral clones. The cell monolayers were lysed in 1.5 mL of supernatants by freeze/thaw and centrifuged for 5 min at 2000 g at 4° C. for clarification. The resulting supernatants were designated as passage 0 (P0), aliquoted and stored at −80° C.

[0703] Antigen expression and sequence of the insert were checked by Western blot for P0 of each rescued clone (FIGS. 4 and 13) and Sanger sequencing respectively. Clones with good antigen expression and verified insert sequence were selected for further propagation.

[0704] Viral Clone Propagation in Cell Culture

[0705] The P0 seed of rescued recombinant MV clones were thawed. Virus propagation was carried out in Vero cells cultured in DMEM+5% FCS in T150 flasks, infected at a multiplicity (M.O.I) of 0.05 and incubated at 37° C.+5% CO₂. On day 2 to 3 post infection, when syncytia/CPE reached 80-95% of the Vero cell monolayer, virus was harvested by a freeze/thaw cycle of the cell monolayers scraped in 2.5 mL of supernatant. Cell debris were removed by centrifugation at 2000 g for 5 minutes at 4° C. (passage 1, P1). Antigen expression and sequence of the insert were checked for P1 of each selected clone. For further passaging and evaluation of genetic stability of the rescued viruses, these steps are repeated.

[0706] ELISA Assays Specific for MV and SARS-CoV-2 S

[0707] The induction of MV and SARS-CoV-2 specific antibodies in immunized mice was evaluated by indirect ELISA as described previously (Escriou et al., 2014). Microtiter plates were coated with purified measles antigen (Jena Bioscience) or recombinant trimerized SARS-CoV-2 spike ectodomain expressed in HEK 293T cells, respectively, and incubated with serial dilutions of the mouse sera. Bound antibodies were revealed with mouse-specific anti-IgG (gamma chain-specific) secondary antibody coupled to horseradish peroxidase (Southern Biotech) and TMB (KPL). ELISA IgG titers were calculated as the reciprocal of the highest dilution of individual serum giving an absorbance of 0.5.

[0708] SARS-CoV-2 Microneutralization Assay

[0709] Two or three-fold serial dilutions of heat-inactivated mouse serum samples in DMEM+1% BSA+10 mM Tricine were incubated at 37° C. for 2 hours with 20 TCID50 of SARS-CoV-2 and added to subconfluent monolayers of FRhK-4 cells plated in DMEM+5% FCS in a 96-well microtiter plates. Each serum dilution was tested in quadruplicate and cytopathic effect (CPE) endpoints were read up to 5 days after inoculation at 37° C.+5% CO₂. Neutralizing antibody titers were determined according to the Reed and Muench method (Reed and Muench, 1938) as the reciprocal of the highest dilution of serum, which prevented CPE in at least 2 out of 4 wells.

[0710] MV and SARS-CoV-2 ELISPOT Assay

[0711] Splenocytes from immunized or control mice were harvested, single cell suspensions were prepared and the frequency of MV and SARS-CoV-2-specific IFN-γ-producing T cells was quantified in a standard ELISPOT assay. Briefly, 96-wells Multi-screen PVDF plates (Millipore) were coated with 5 μg/ml rat anti-mouse IFN-γ antibodies (AN18, Becton-Dickinson) in PBS. Plates were washed and blocked with complete RPMI medium (RPMI 1640 supplemented with 10% FCS, 10 mM Hepes, 5×10-5 M β-mercaptoethanol, non-essential amino acids, Sodium Pyruvate, 100 U/ml penicillin and 100 μg/ml styreptomycin) for 2 h. Various numbers of splenocytes (typically 4×105, 2×105 and 1×105) from immunized and control mice were then plated in triplicate in the presence or absence of the appropriate peptide (1-10 μM) and IL2 (10 U/ml). The cells were incubated for 20 h at 37° C., and after extensive washes, the spots were revealed by successive incubations with biotinylated rat anti-mouse IFNγ antibodies (R46A2, Becton-Dickinson), alkaline phosphatase-conjugated streptavidin (Becton-Dickinson) and 5-bromo-4-chloro-3-indolylphosphate/nitroblue tetrazolium (NBT/BCIP, Sigma) as the substrate. The spots were counted using an automated ImmunoSpot® analyzer and associated Biospot 7.0 software (CTL). For each mouse, the number of peptide-specific IFNγ-producing cells was determined by calculating the difference between the number of spots generated in the presence of a negative control peptide and of the specific peptide. Results were expressed as the number of spot-forming cells (SFCs) per 10⁶ splenocytes.

[0712] In order to determine the responses against the SARS-CoV-2 spike protein, T cells were stimulated at a total concentration of 10 μM with peptide pools spanning the S1 and S2 domains, respectively, containing 15-mer peptides with 10 amino acid overlaps (Mimotopes).

[0713] These pools contained 135 and 118 peptides, respectively.

[0714] The measles H22-30 (RIVINREHL of SEQ ID NO: 67) and H446-454 (SNHNNVYWL of SEQ ID NO: 68) peptides and the NP366 (SCOT) peptide (ASNENMD™ of SEQ ID NO: 69) were synthesized by Eurogentec and used at a concentration of 1 μM each, as positive and negative control peptides, respectively.

[0715] Intracellular Cytokine Staining

[0716] Splenocytes from vaccinated or control mice were harvested and single cell suspensions were prepared. One million splenocytes were cultured in IMDM with Glutamax (ThermoFisher), 10% FBS, 1% penicillin-streptomycin, 10 IU/ml IL-2 (Miltenyi Biotec), 100 ng/ml IL-7 (Miltenyi Biotec). Cells were stimulated for 6 hours at 37° C. with peptide pools at a final concentration of 2 μg/ml per peptide (reconstituted in 5% DMSO). BD GolgiPlug and BD GolgiStop (BD Biosciences) were added for the final 4 hours. For positive controls cells were stimulated with 50 ng/ml PMA (Sigma Aldrich) and 1 μg/ml lonomycin (Sigma Aldrich), for negative controls medium with DMSO was used. Cells were incubated with mouse Fc receptor block (anti-mouse 2.4G2) and Fixable viability dye eFluor506 (eBioscience) to exclude dead cells. Cells were stained with α-CD45 BUV395 (BD Pharmingen #564279), α-CD19 AF700 (eBioscience #56-0193-80), α-CD11b AF700 (eBioscience #56-0112-82), α-CD11c AF700 (eBioscience #56-0114-82), α-CD3e BV650 (BD Pharmingen #564378), α-CD4 eFluor 450 (eBioscience #48-0041-80), α-CD8a PerCp Cy5.5 (BD Pharmingen #5511622), α-CD44 BV786 (BD Pharmingen #563736), α-CD62L APC-Cy7 (BioLegend #104427). Following fixation and permeabilization (BD Cytofix/Cytoperm, BD Biosciences) cells were stained intracellularly with α-TNFα FITC (eBioscience #11-7321-81), α-IFNγ PE-Cy7 (BD Pharmingen #55764), α-IL-5 PE (eBioscience #12-7052-82), α-IL-13 eFluor 660 (eBioscience #50-7133-82). Cells were acquired by flow cytometry using a Fortessa (BD Biosciences) and data was analyzed with FlowJo v10.7 software.

[0717] Challenge of IFNAR-KO Mice with SARS-CoV-2

[0718] Groups of six- to nine-week-old IFNα/βR−/− mice (IFNAR-KO) in a 129/Sv background permissive for measles vaccine were injected intraperitoneally (i.p.) with 10⁵ TCID50 of recombinant MVSchw/SARS-CoV-2-S or parental MVSchw. Booster injections were administered 4 weeks thereafter. Serum samples were collected at the indicated time points. To induce expression of the human ACE2 receptor, immunized mice were lightly anaesthetized with a Ketamine/Xylazine solution (50 mg/kg and 10 mg/kg, respectively) and administered intranasally with 6.0×10³ ICU of Ad5-hACE2 (adenovirus 5 expressing the human ACE2 receptor of SARS-CoV-2, Ku at al. 2021) in 30 μL PBS. Four days later, mice were anaesthetized as described above and inoculated intranasally with 2×10⁴ TCID50 (Tissue Culture Infectious Dose 50%) of the France/IDF0372/2020 SARS-CoV2 strain in 30 μL of PBS. Infected mice were euthanized at 4 days post-SARS-CoV-2 challenge by cervical dislocation. Halves of each lung lobes were removed aseptically, rinsed extensively in PBS and kept on ice until grinding in 750 μL of ice-cold PBS using a FastPrep®-24 homogenizer and Lysing Matrix M tubes containing a 6.35 mm diameter Zirconium Oxide ceramic grinding sphere (MP Biomedical) by two successive pulses at 4 m/s for 20s with incubation on ice between the two homogenization cycles. Homogenates were clarified by centrifugation for 10 min at 2000 g at 4° C. and kept at −80° C. in single-use aliquots.

[0719] SARS-CoV-2 genomic RNA loads in lungs were determined by extracting viral RNA from 70 μL of lung homogenate using QIAamp Viral RNA Mini Kit (Qiagen) according to the manufacturer's procedure. To remove putative non-particulate viral RNA in lung homogenates, 70 μL samples were treated with 100U RNaseI (Ambion) for 30 min at 37° C. prior to inactivation with the AVL buffer of the QIAamp Viral RNA Mini Kit. Viral loads (as expressed in genome equivalents (GEQ)/lung) were determined following reverse transcription and real-time TaqMan® PCR essentially as described by Corman et al. (Euro Surveill. 2020), using SuperScript™ Ill Platinum One-Step Quantitative RT-PCR System (Invitrogen) and primers and probe (Eurofins) targeting SARS-CoV-2 envelope (E) gene as listed in Table 7. In vitro transcribed RNA derived from plasmid pCI/SARS-CoV E was synthesized using T7 RiboMAX Express Large Scale RNA production system (Promega), then purified by phenol/chloroform extractions and two successive precipitations with ethanol. RNA concentration was determined by optical density measurement, then RNA was diluted to 10⁹ genome equivalents/μL in RNAse-free water containing 100 μg/mL tRNA carrier, and stored in single-use aliquots at −80° C. RNA quality was controlled on Agilent 2100 bioanalyzer_Eukaryote Total RNA Nano Series II. Serial dilutions of this in vitro transcribed RNA were prepared in RNAse-free water containing 10 μg/mL tRNA carrier and used to establish a standard curve in each assay. Thermal cycling conditions were as follows: (i) reverse transcription at 55° C. for 10 min, (ii) enzyme inactivation at 95° C. for 3 min, (iii) 45 cycles of denaturation/amplification at 95° C. for sec, 58° C. for 30 sec. Products were analyzed on an ABI 7500 Fast real-time PCR system (Applied Biosystems).

TABLE 7
Sequences of primers and probes for SARS-CoV-2
load determination.

| | | SEQ |
|---|---|---|
| Primer/Probe | | ID |
| Name | DNA Sequences | NO |
| E_Sarbeco_F1 | 5′- ACAGGTACGTTAATAGTTAATAGCGT -3′ | 70 |
| E_Sarbeco_R2 | 5′- ATATTGCAGCAGTACGCACACA -3′ | 71 |
| E_Sarbeco_P1 | 5′- FAM-ACACTAGCCATCCTTACTGCGCTTCG- | 72 |
| | BHQ-1 -3′ | |

[0720] Infectious SARS-CoV-2 titers in lung homogenates were determined in Vero-E6 cells seeded in 12-well plates. Cells in duplicate wells were infected with each 5-fold serial dilution of lung homogenates in DMEM medium containing 10 mM tricine and 1 mg/mL BSA. Following 1 h incubation at 37° C. under 5% CO₂ atmosphere, viral inoculum was withdrawn and cells were placed in medium containing 1 μg/mL trypsin and 1.2% Avicel RC581 (FMC Biopolymer), then further incubated at 37° C. for 72 h. Cell sheets were then fixed with formaldehyde and stained with 0.1% crystal violet and plaques were counted. Infectious viral titers were expressed as plaque forming units (PFU)/lung.

[0721] 2. Results and Discussion

[0722] Rescue and Characterization of Recombinant MV in Cell Culture

[0723] Growth Characteristics

[0724] Recombinant MV expressing SARS-CoV-2 S from ATU3 was successfully rescued. MV-ATU3-S was propagated in Vero NK cells and grew to high titers of above 10⁷ tissue culture infectious dose 50 (TCID₅₀). Genetic stability was confirmed by Sanger sequencing of the ATU and NGS sequencing of the full-length genome of independent viral clones retrieved following transfection. Efficient S expression was demonstrated in cells infected with each clone of MV-ATU3-S as shown in FIG. 4A for a representative clone. In time-course experiments, the MV-ATU3-S virus reached the peak titer after 48 h and then declined by about 1 log titer, in contrast to MV-Schw which showed stable virus titers between 48 and 72 h. Upon infection of cells, measles virus typically induces the formation of multinucleated cells (syncytia, FIG. 5) as a result of the interaction between the virus fusion (F) and attachment (H) glycoproteins and the host cell plasma membrane. Ultimately, the first syncytia fuse progressively together, resulting in wide areas or fused cells. In cells infected with MV-ATU3-S an increased number of such large syncytia was observed at late times after infection (FIG. 5). This fusogenic phenotype of MV-ATU3-S was observed from early on after infection (not shown) and the greater extension of fused area coincided with the peak of viral titer at 48 h post-infection. At this timepoint, the large syncytia collapsed and the infected cell monolayer displayed extensive cytopathogenic effect (CPE), thus impacting viral replication of MV-ATU3-S compared to MV-Schw. The fusogenic phenotype suggested that in cells infected with MV-ATU3-S the native spike expressed on the cell surface was functional in the sense that it could interact with the ACE2 receptor on the neighboring cells and promote cell fusion. For generating a vaccine candidate, an enhanced fusogenic phenotype, such as that observed for MV-ATU3-S, was considered a potential safety risk as it might change the tropism of the measles vector virus. Thus, spike protein variants with reduced or abolished fusogenic properties were designed through two complementary approach, based on either stabilizing the spike in its prefusion state trough the “2P” mutations (K986P+V987P) or preventing cleavage at the S1/S2 junction through the “3F” mutations (R682G+R683S+R685G) of the multibasic cleavage site or “ΔF” deletion of the encompassing Q675-R685 loop (FIG. 2). Modified spike genes expressing the variant spike proteins with the aforementioned modifications and combinations thereof were generated and first evaluated for their ability to promote cell fusion after transient transfection in the presence of hACE2 expression in an assay based on cells harboring the split-GFP system (Buchrieser et al., 2020). Data showed that spike protein harboring either the “2P” mutation alone, the “3F” mutation of the multibasic S1/S2 furin cleavage site alone, or combinations of “2P” and “3F”, or “2P” and the deletion of the furin cleavage site “ΔF” (FIG. 2) did not induce fusion of hACE2-expressing HEK 293T cells in contrast to the native spike (FIG. 16).

[0725] As suggested by these results, locking the S protein in its pre-fusion state by introducing the “2P” mutation (FIG. 2) abolished the enhanced fusogenic phenotype of any recombinant measles vector viruses expressing such stabilized spike variants. Recombinant MV-ATU3-S2P, MV-ATU3-S2P3F, MV-ATU3-S2PΔF, and MV-ATU3-S2PΔF2A were indeed successfully rescued and all grew to high titers of above 10 TCID₅₀. Infection of Vero NK cells with MV-AUT3-S2P, MV-ATU3-S2P3F, MV-ATU3-S2PΔF, and MV-ATU3-S2PΔF2A resulted in similar syncytia formation as infection with the parental MV Schwarz (FIG. 5), confirming absence of enhanced fusion activity as compared to MV-ATU3-S expressing native S. Genetic stability of all 4 constructs harboring the 2P stabilizing mutation was confirmed after 5 passages in cell culture by Sanger sequencing of the ATU and NGS sequencing of the full-length viral genome.

[0726] Recombinant MV clones expressing native SARS-CoV-2 S from ATU2 grew to much lower titers than parental Measles Schwarz or developed nonsense compensating mutations in the spike transgene soon after rescue (P0) or after subsequent passage 1 (P1) that restored high titer growth. This indicates that the fully codon-optimized S gene generates unstable MV vector when inserted into position ATU2. A possible explanation for this may be linked to increased S expression levels driven from the upstream ATU2 position than from the downstream ATU3 position, in relation to the gradient of gene expression generated by MV replication (Plumet, 2005). Thus, measles vector constructs expressing native and variant spike proteins from the measles-optimized nucleotide sequence inserted in the ATU2 position (FIG. 3C) were generated. These constructs, MV-ATU2-S_{MVopt}, MV-ATU2-S_{MVopt}2P, MV-ATU2-S_{MVopt}ΔF, MV-ATU2-S_{MVopt}2PΔF grew to high titers above 10⁷ TCID₅₀. The correct sequence of the insert was confirmed by Sanger sequencing of the ATU, indicating that the measles-optimized S gene remarkably generates stable MV vectors when inserted into position ATU2.

[0727] Antigen Expression

[0728] Spike expression in recombinant MV-infected Vero cells was confirmed by Western Blot analysis using polyclonal rabbit antisera raised against recombinant S protein of SARS-CoV-1 (Escriou et al., Virology, 2014) or SARS-CoV-2. As shown in FIG. 4, a major band was detected for all samples with the expected apparent molecular mass of 180 kDa, indicating expression of full length S protein. Minor bands with apparent molecular masses of 100 and 80 kDa respectively were detected for lysates prepared from cells infected with MV-ATU3-S and MV-ATU3-S2P, demonstrating that the S was partially cleaved into its S1 and S2 domains. Inactivation of the furin cleavage site either by mutation (MV-ATU3-S2P3F) or deletion of the small encompassing loop (MV-ATU3-S2PΔF, MV-ATU3-S2PΔF2A) abolished the cleavage as expected (FIG. 4B). In addition, expression of spike polypeptide was readily detected by indirect immunofluorescence (IFA) of non-permeabilized syncytia, indicating that any of the native and mutated S was efficiently transported to the surface (FIG. 5B).

[0729] Insertion of the measles-optimized nucleotide sequence (SEQ ID NO: 36) in ATU2 resulted in similar expression levels as the insertion of the fully codon-optimized nucleotides sequence in ATU3 (FIG. 13A). Equivalently to the spike protein expressed from the fully codon-optimized nucleotide sequence in ATU3, S_{MVopt}2P protein expressed at ATU2 was partially cleaved into S1 and S2, whereas the spike protein with furin site deletion expressed by MV-ATU2-S_{MVopt}ΔF and MV-ATU2-S_{MVopt}2PΔF was not cleaved (FIG. 13B).

[0730] Immunogenicity

[0731] The immunogenicity of COVID-19 vaccine was evaluated in 129sv Type 1 interferon receptor (Interferon-α/β receptor, IFNAR)-deficient mice, a small animal model suitable for the assessment of measles-vectored vaccines. All experiments were approved and conducted in accordance with the guidelines of the Office of Laboratory Animal Care at the Institut Pasteur, Paris. IFNAR KO mice were housed under specific pathogen-free conditions at the Institut Pasteur animal facility. Groups of six 6-10 week-old IFNAR KO mice were immunized with two intraperitoneal injections at 3 to 4-week interval of 1×10⁵ TCID50 of the vaccine candidates or immunized only once. As a control, a group of mice injected with empty MV vector MV-Schwarz (1×10⁵ TCID50) was included in each study. Mouse sera were collected 18-21 days after the first and second injection.

[0732] Humoral Responses

[0733] To assess the humoral responses, SARS-CoV-2 and MV-specific antibody responses were evaluated for each individual mouse by indirect ELISA. Mice immunized with the different recombinant measles viruses expressing SARS-CoV-2 spike seroconverted to measles virus after prime immunization as determined by measles-specific ELISA (FIG. 6A). Anti-measles responses were similar for all tested MV constructs and parental MV-Schwarz, suggesting that expression of the heterologous S protein by the recombinant viruses did not alter their replication in vivo nor modify their measles-specific immunogenicity. Some mice did not respond or responded poorly to the prime immunization but did respond after boost immunization. After boost, the anti-MV antibody levels increased by about 10-fold as expected from previous studies in mice.

[0734] All mice immunized with MV-ATU3-S, MV-ATU3-S2P, MV-ATU3-S2P3F, MV-ATU3-S2PΔF, and MV-ATU3-S2PΔF2A that responded with anti-measles antibodies also responded with high titers of spike-specific antibodies, in the 10⁴ range, after prime as measured by an ELISA specific for the ectodomain of the SARS-CoV-2 spike protein (FIG. 6B). After boost, the anti-S antibody levels increased by about 10-fold as seen for anti-MV antibodies. In contrast, control mice immunized with empty MV-Schwarz all tested negative. While not statistically significant, there was a slight trend of higher anti-S antibody levels elicited by constructs with inactivated furin cleavage site (MV-ATU3-S2P3F, MV-ATU3-S2PΔF, and MV-ATU3-S2PΔF2A) compared to those elicited by MV-AUT3-S and MV-ATU3-S2P.

[0735] Anti-SARS-CoV-2 neutralizing antibodies were detected using a microneutralization assay. All recombinant MV expressing SARS-CoV-2 S elicited neutralizing antibodies after one immunization (FIG. 7). As shown in FIG. 7, and repeated in additional experiments (data not shown) there was a trend of increasing neutralizing titers after prime in mice immunized with the following constructs: MV-ATU3-S<MV-ATU3-S2P<MV-ATU3-S2P3F<MV-ATU3-S2PΔF/MV-ATU3-S2PΔF2A. After the boost, neutralizing titers increased by at least 10-fold. All recombinant MV expressing SARS-CoV-2 S with inactivated furin cleavage site elicit similar neutralizing antibody levels after boost and higher levels than MV-ATU3-S and MV-ATU3-S2P. The difference between the neutralizing titers after boost of MV-ATU3-S2P and MV-ATU3-S2P3F is statistically significant (p=0.0216 Mann-Whitney test). This was confirmed by plaque reduction neutralization test 90 (PRNT90).

[0736] Based on the recommendation of the International Coalition of Medicinal Regulatory Agencies (ICMRA) on Mar. 18, 2020, it is important to ensure induction of a Th1 response to mitigate the risk of potential disease enhancement that was observed in animal models with SARS-CoV-1 vaccine candidates. As IgG isotype analysis allows obtaining a first indication of skewing of the ongoing CD4⁺ helper T cell response into a type 1 (Th1) or type 2 (Th2) response, the ratio of IgG2a to IgG1 antibody titers was measured by isotype-specific anti-S ELISA. As shown in FIGS. 11A and 11B, this analysis revealed that MV-ATU3-S, MV-ATU3-S2P, MV-ATU3-S2P3F, MV-ATU3-S2PΔF, and MV-ATU3-S2PΔF2A all induced higher IgG2a than IgG1 levels indicative of a Th1 response. Control experiments were performed by immunizing wt 129/Sv mice with alum-adjuvanted trimerized spike ectodomain. After prime and boost these mice had much higher IgG1 than IgG2a antibody titers (FIGS. 11C and 11D), indicating that the induced immune responses were predominantly of Th2-type as we previously observed after immunization with alum-adjuvanted SARS-CoV-1 spike ectodomain (Escriou, 2014).

[0737] A comparison of the immunogenicity of MV-ATU3-S and MV-ATU2-S_{MVopt} as assessed by anti-MV ELISA, anti-S ELISA and SARS-CoV-2 microneutralization showed no differences in the elicited antibody responses by the two measles vector viruses after the first or after the second immunization (FIG. 14).

[0738] T Cell Responses

[0739] Splenic T cell responses were analyzed to directly assess the type of T helper cell responses as well as cytotoxic T cell responses. S protein-specific T cell responses were measured in splenocytes 19-25 days after boost immunization. T cells were stimulated with peptide pools spanning the full length of the S1 and S2 domains of the spike protein, respectively, containing 15-mer peptides with 10 amino acid overlaps. As control, measles-specific responses were assessed using a pool of 2 measles peptides specific for CD8⁺ T cells (Reuter et al, PLoS ONE, 2012, 7(3), e33989, I-8).

[0740] IFN-γ producing T cells were enumerated by ELISpot in mice immunized with MV-ATU3-S2PΔF2A and demonstrated cellular responses against peptides spanning the S protein (FIG. 8). Cellular responses to the measles vector backbone were also confirmed (FIG. 8).

[0741] Cytokine production by CD4⁺ T cells and CD8⁺ T cells was characterized by intracellular cytokine staining analyzed by flow cytometry. Mice were immunized with MV-ATU3-S, MV-AUT3-S2P, MV-AUT3-S2P3F, MV-ATU3-S2PΔF, MV-ATU3-S2PΔF2A or with the parental MV Schwarz strain. In all mice immunized with recombinant MV expressing SARS-CoV-2 spike protein, intracellular cytokine staining of splenocytes detected IFN-γ and TNF-α double positive CD8⁺ and CD4⁺ T cells in response to S1 and S2 peptide pools spanning the whole S protein. This indicated a functional status of these T cells and confirmed that S-specific Th1-type responses were induced by the vaccine candidates (FIG. 9, Panels A and B). In addition, a CD8+ T cell response to the measles vector backbone was confirmed by demonstrating IFN-γ and TNF-α double positive CD8+ T cells in mice receiving the recombinant candidates as well as the parental MVSchw (FIG. 9, Panel A and C). In contrast, only a marginal fraction of S-specific T cells expressing IL-5 and IL-13, characteristic for Th2 responses, was detected in mice receiving any of the recombinant candidates (FIG. 9, Panels A and B).

[0742] In order to characterize the T cell response in more detail, T cells producing a single cytokine in response to S peptide pools (FIG. 10, Panels B and D) were assessed in mice immunized with MV-ATU3-S2PΔF2A and the parental MV Schwarz in addition to double cytokine-positive T cells (FIG. 10, Panels A and C, same results as also included in FIG. 9). Only TNF-α producing CD4⁺ T cells were present in higher frequency in mice immunized with MV-ATU3-S2PΔF2A than in mice immunized with MVSchw control (FIG. 10, Panel B). All other CD4⁺ and CD8⁺ single cytokine producing T cells were found with similar frequency in MV-ATU3-S2PΔF2A and MWSchw immunized mice (FIG. 9, Panels B and D), indicating that these responses were not specific to the spike protein.

[0743] Taken together, these results indicated that a functional Th1-type T cell response targeting epitopes of the S protein is induced by immunization with recombinant MV expressing SARS-CoV-2 spike protein, including MV-ATU3-S, MV-AUT3-S2P, MV-AUT3-S2P3F, MV-ATU3-S2PΔF and MV-ATU3-S2PΔF2A. This response is characterized by the predominant induction of IFN-γ and TNF-α producing CD8⁺ T cells as well as IFN-γ and TNF-α producing CD4⁺ T cells.

[0744] Protection Against SARS-CoV-2 Challenge

[0745] To assess the potential of the measles vector constructs to induce protection against experimental challenge infection with SARS-CoV-2, the inventors used the model of transient expression of human ACE2 receptor in the lungs of IFNAR-KO mice to allow subsequent infection with SARS-CoV-2 (Ku et al, 2021).

[0746] To assess protection after prime and boost immunization, mice were immunized with either MV-ATU3-S, MV-ATU3-S2P, MV-ATU3-S2PΔF, MV-ATU3-S2PΔF2A, or the parental MV Schwarz strain as control. Mice were instilled with AD5:hACE2 25 days after the second immunization and inoculated intranasally with 2×10⁴ pfu of SARS-CoV-2 four days later. The presence of SARS-CoV-2 virus in the lungs was assessed by RT-qPCR measuring genome equivalents (GEQ) RNA levels as well as by quantification of infectious virus in Vero cells. As shown in FIG. 12, Panel A, all measles vector constructs significantly reduced the viral load in the lungs compared to MVSchw parental virus. GEQ were reduced by approximately 1.5 logs by MV-ATU3-S, MV-ATU3-S2P and 2.5 logs by MV-ATU3-S2PΔF and MV-ATU3-S2PΔF2A. In addition, infectious virus was only detected at low residual titers in one mouse each in the groups immunized with MV-ATU3-S and MV-ATU3-S2P, specifically in the mice that responded poorly to the immunization and had very low neutralizing antibody titers, and not in any of the mice immunized with MV-ATU3-S2PΔF and MV-ATU3-S2PΔF2A. Altogether these results showed that vaccination with the recombinant MV significantly reduced the viral load in the lungs of the animals and particularly that the presence of infectious virus was prevented. Noteworthy, the efficiency of protection followed the hierarchy observed for the induction of neutralization antibody levels, MV-ATU3-S2PΔF and MV-ATU3-S2PΔF conferring better protection than MV-ATU3-S and MV-ATU3-S2P.

[0747] Noticeably, the level of neutralizing antibody titer in blood samples taken 9 days before the challenge inversely correlated with the efficiency of protection in individual mice (whatever immunogen) as assessed by levels of GEQ (p=0.0149) and PFU (p=0.0253). This suggests that neutralizing antibody levels in the blood contribute directly or indirectly to the reduction of SARS-CoV-2 replication after infection.

[0748] Based on the promising results after prime and boost immunization, protection after prime only was assessed in mice immunized with MV-ATU3-S2PΔF2A. This experiment was also designed to investigate the longevity of the antibody response up to 165 days after prime only immunization. Microneutralization titers measured at ˜6 months following prime (FIG. 12, Panel B, μNT) were high, in the range of 10³, yet about 10-fold below the levels reached after boost immunization with this vector (FIG. 12, Panel A, μNT). The challenge and viral load analysis were performed as described above. Significant reduction of GEQ/lung by 2 logs was observed (FIG. 12, Panel B). Infectious SARS-CoV-2 virus was only recovered at very low titer from the lungs of one out of six mice immunized with MV-ATU3-S2PΔF2A, demonstrating strong protection after prime immunization only with MV-ATU3-S2PΔF2A.

[0749] Protection after prime only was also assessed in mice immunized with MV-ATU3-S2PΔF2A in comparison to mice immunized with MV-ATU3-S2P and to mice immunized with empty vector MV-Schwarz, as a control. This experiment was designed to investigate short-term protection 4 weeks only after prime immunization.

[0750] As already shown in an experiment depicted in FIG. 6B, all mice immunized with MV-ATU3-S2P and MV-ATU3-S2PΔF2A responded with high titers of measles-specific and spike-specific antibodies, in the 10⁴ range, as measured by ELISA (FIG. 17, panel A). Significantly higher neutralizing antibody levels (p=0.0087 Mann-Whitney) were elicited by the MV-ATU3-S2PΔF2A construct with inactivated furin cleavage site [2.6±0.1 log 10(NT titers)] compared to those elicited by MV-ATU3-S2P with 2P-stabilized S [2.1±0.2 log 10(NT titers)].

[0751] Protection from challenge with SARS-CoV-2 was assessed as described above. As shown in FIG. 17, Panel B, immunization with both measles vector constructs significantly reduced the viral load in the lungs compared to MVSchw parental virus. GEQ RNA levels were reduced by approximately 0.8 log by MV-ATU3-S2P and 1.3 log by MV-ATU3-S2PΔF2A. In addition, infectious virus was only detected at low residual titers in half of 6 mice immunized with MV-ATU3-S2P, specifically in mice that had the lowest neutralizing antibody titers. No infectious virus was detected in mice immunized with MV-ATU3-S2PΔF2A.

[0752] Altogether, this experiment showed that vaccination with recombinant MVs significantly reduced the viral load in the lungs of animals as early as 4 weeks after prime immunization. It also confirms that the efficiency of protection follows the hierarchy observed for the induction of neutralization antibody levels, i.e. MV-ATU3-S2PΔF2A confers better protection after prime than MV-ATU3-S2P.

[0753] Enhanced Immunogenicity and Protective Potential of Recombinant MV Schwarz Viruses Expressing SARS-CoV-2 S6P, 6P3F and 6PΔF Protein.

[0754] In an effort to further stabilize the spike protein, spike protein variants were designed by combining “6P” mutations (F817P, A892P, A899P, A942P, K986P, V987P) with the above-described “3F” mutations (R682G+R683S+R685G) or “ΔF” deletion (Q675-R685 loop of SEQ ID NO: 50) (FIG. 2). Modified spike genes encoding the variant spike proteins with the aforementioned modifications and combinations thereof were generated and inserted into the pKM-MVSchw-ATU3 vector. The resulting pKM3-S6P plasmid was used to successfully rescue the single recombinant MV-ATU3-S6P vaccine candidate using a helper-cell-based system as described above. MV-ATU3-S6P viral clones were propagated in Vero NK cells, grew to high titers of above 10⁷ TCID₅₀/mL and were confirmed to be genetically stable by Sanger sequencing of the ATU. Infection of Vero NK cells with MV-ATU3-S6P resulted in similar syncytia formation as infection with the parental MV Schwarz (not shown), indicating absence of enhanced fusion activity observed with MV-ATU3-S expressing native S and, thus, confirming efficient locking of S6P in the prefusion state. S expression was demonstrated in cells infected with each clone of MV-ATU3-S6P and showed partial cleavage into S1 and S2 domains (FIG. 15A). Noteworthy, similar expression levels were observed in cells infected with MV-ATU3-S, MV-ATU3-2P and MV-ATU3-S6P. This contrasts with the substantially higher expression levels observed by Hsieh et al. (Science, 2020) for the secreted and uncleaved ectodomains of S6P as compared to expression level of that of S2P upon transient expression in HEK293T cells. The fact that MV-ATU3-S6P expression level remains in the range of that of 2P will permit the comparative evaluation of the intrinsic immunogenicity properties of S2P and S6P. MV-ATU3-S6P3F and MV-ATU3-S6PΔF will be rescued and characterized essentially as described above to demonstrate expression of uncleaved and full-length forms (S6P3F, S6PΔF) of the S6P antigen in infected Vero NK cells.

[0755] Most mice immunized with MV-ATU3-S6P responded after prime with high titers of measles-specific and spike-specific antibodies, in the 10⁴ range, as measured by ELISA (FIG. 15, panel B and C). SARS-CoV-2 neutralizing titers were in the 10² range (FIG. 15, panel D). Among Measles responder mice after prime, there was a trend of increased SARS-CoV-2-specific ELISA and neutralizing titers in mice immunized with the following constructs: MV-ATU3-S2P [3.8±0.1 log 10(ELISA titers); 1.5±0.2 log 10(NT titers)]<MV-ATU3-S6P [4.1±0.1 log 10(ELISA titers); 2.1±0.2 log 10(NT titers)]<MV-ATU3-S2PΔF [4.6±0.3 log 10(ELISA titers); 2.5±0.3 log 10(NT titers)]. The difference between the neutralizing titers after prime of MV-ATU3-S2P and MV-ATU3-S6P is statistically significant (p=0.0079 Mann-Whitney test).

[0756] After boost, the anti-S antibody levels increased by about 10-fold, as observed for anti-MV antibodies and as already noted above for most spike variants vectorized by the Measles platform. Although not statically significant, MV-ATU3-S6P [3.9±0.1 log 10(NT titers)] elicited slightly higher neutralizing antibody levels after boost than MV-ATU3-S2P [3.5±0.3 log 10(NT titers)] and lower levels than MV-ATU3-S2PΔF (4.1±0.2 log 10(NT titers)).

[0757] Challenge and analysis of pulmonary viral loads were performed 4 weeks after boost immunization as described above. As shown in FIG. 15, Panel E, all measles vector constructs significantly reduced the viral load in the lungs compared to MVSchw parental virus. GEQ RNA levels were reduced by approximately 1.7 log by MV-ATU3-S2P and 2.2 log by MV-ATU3-S6P and MV-ATU3-S2PΔF2A. Noteworthy, the efficiency of protection followed the trend observed for the induction of neutralization antibody levels, MV-ATU3-S2PΔF conferring slightly better protection than MV-ATU3-S2P and MV-ATU3-S6P.

[0758] From these experiments, we conclude that the S6P performed better in terms of induction of neutralizing antibodies than the S2P antigen. Given the fact that both antigens are expressed at similar levels from the Measles vector, this suggests that S6P is more efficient locked in prefusion state than S2P and/or has higher stability. Given the fact that the “3F” mutations and the “ΔF” deletion synergize with the “2P” mutations for the induction of neutralizing antibodies, we anticipate that this may also be the case with the “6P” mutations and that MV-ATU3-S6P3F and MV-ATU3-S6PΔF will perform better for the induction of protective neutralizing antibodies than MV-ATU3-S6P and also than MV-ATU3-S2P3F and MV-ATU3-S2PΔF, respectively.

[0759] Immunogenicity and Protective Potential of Recombinant MV Schwarz Expressing SARS-CoV-2 Spike Variants Stabilized in the Closed Conformation.

[0760] As an alternative approach to induce protective antibody responses against SARS-CoV-2, the inventors designed full-length SARS-CoV-2 spike variants locked in their prefusion state by single/double Proline substitutions and covalently stabilized in the closed conformation by an additional disulfide bond. These include, but are not limited to combination of either the “2P” or “6P” mutations described above, and the double S383C/D985C “CC” mutation (SCCPP and SCC6P). This “CC” mutation was reported independently by McCallum et al, Henderson et al, and Xiong et al (2020) and shown to efficiently stabilize the spike ectodomain in its closed conformation with RBDs in down conformation. Alternatively, the inventors can combine any prefusion stabilization mutation with the double G413C/P987C “CC2” mutation, which was shown by Xiong et al to also stabilize the spike in its closed conformation. The inventors can also rely on SARS-CoV-2 spike variants covalently stabilized by the sole addition of disulfide bonds and hypothesize that such double cysteine mutations can stabilize by themselves the spike in the closed prefusion conformation.

[0761] Noteworthy, the furin cleavage site is not inactivated in the SCCPP and SCC6P constructs described above and the inventors anticipate that the RBD closed down state can limit access of the cleavage site in these constructs, thus making it resistant to furin-mediated proteolysis. Alternatively, in an effort to further stabilize the spike protein, spike protein variants can be designed by combining the “SCCPP” or “SCC6P” mutations with the above-characterized “3F” mutations or “ΔF” deletion.

[0762] Modified spike genes encoding the variant spike proteins with the aforementioned modifications and combinations thereof are generated and inserted into the pKM-MVSchw-ATU3 vector. The corresponding vaccine candidates can be rescued and characterized essentially as described above. These MV constructs may express uncleaved full-length spike in its closed conformation with RBDs in down conformation and largely occluded. The expressed closed spike can have much reduced binding affinity for the ACE-2 receptor of SARS-CoV-2, which is a major advantage for vectorization by the measles platform since it prevents the enhanced fusogenic phenotype the inventors observed for MV-ATU3-S and considered as a potential safety risk.

[0763] Immunogenicity and protective potential of these vaccine candidates can be evaluated in IFNAR-KO mice. MV constructs expressing “closed” spikes may induce different immune responses from those raised against native proteins (such as S2P) with lower levels of neutralizing, RBD-specific antibodies preventing ACE-2 binding and higher levels of antibodies binding to the RBD in down-position. The inventors expect these alternate antibodies to provide enhanced and/or broader protection against SARS-CoV-2 variants.

[0764] Immunogenicity and Protective Potential of Recombinant MV Schwarz Expressing a Secreted Form of SARS-CoV-2 Spike.

[0765] As an alternative approach to induce protective responses against SARS-CoV-2 and to avoid the enhanced fusogenic phenotype the inventors observed for MV candidates expressing full-length spike, the inventors evaluated MV candidates expressing spike ectodomain as a soluble and secreted form of S.

[0766] Several constructs were engineered from the fully codon-optimized spike gene and some of them were first cloned with a C-terminal Twin-Strep-Tag into the pCI plasmid (Promega) for transient expression analysis. These constructs are schematized in FIG. 18A and include:
[0767] A soluble and most likely monomeric form of the spike corresponding to its full-length ectodomain (Secto: M1-K1211), whose design is similar to the SARS Sol protective immunogen we successfully expressed with the MV platform (Escriou et al, 2014).
[0768] The soluble and monomeric S1 region (M1-P681) of S ectodomain from initiating methionine to Proline 681, which immediately precedes the predicted RRAR furin cleavage site.
[0769] A soluble and trimerized form of the spike (tri-Secto) corresponding to its full-length ectodomain fused to the GCN4 or T4 fibritin foldon through a Ser-Gly-Gly connecting linker.
[0770] Stabilized variants of tri-Secto, harboring the double K986P and V987P “2P” mutation (tristab-Secto), the “3F” mutations (R682G+R683S+R685G) and/or the “ΔF” deletion (Q675-R685 loop of SEQ ID NO: 50).

[0771] HEK 293T cells were transiently transfected with the set of pCI-Spike_ectomain plasmid DNAs, or, as control, with the pCI-S2P, pCI-S2PΔF and pCI-S3F plasmid DNAs, which encode full-length variants of spike. Supernatants were collected at 48 h post-transfection and spike ectodomain secretion was compared by Western Blot analysis using an anti-StrepTag monoclonal antibody. Only the soluble forms of the (trimerized) ectodomain were detected in the supernatants, indicating efficient secretion when the transmembrane and C-terminal cytosolic domains are truncated (FIG. 18B). Higher levels of spike in the supernatants were detected when the S1/S2 cleavage site was inactivated with the “3F” mutations or the “ΔF” deletion and when the GCN4 foldon was used rather than the T4 foldon. Since expression levels in total cell extracts were in the same range for all constructs (not shown), this suggests either more efficient secretion or increased stability in culture medium of uncleaved and GCN4-trimerized ectodomains.

[0772] The T4-S2P3F, GCN4-S2P3F and T4-S2P polypeptides were purified by affinity chromatography on StrepTactin columns from the supernatants of transiently transfected Expi293F cells and separated by size exclusion chromatography on a Superdex200 column (FIG. 18C). The elution profiles were recorded by absorbance at 280 nm (mAU) and showed that T4-S2P3F was exclusively composed of homotrimers, while GCN4-S2P3F and T4-S2P contained a significant proportion of dimers and dimers/monomers, respectively.

[0773] Altogether, these results indicate that the most efficient secretion and homotrimer folding are obtained when the T4 foldon is combined with the “2P” mutations and inactivation of the S1/S2 cleavage site.

[0774] As a proof of concept, fully codon-optimized cDNAs encoding the native spike ectodomain (Secto) and the best performing T4-S2P3F construct of the trimerized ectodomain variants (as assayed in the above described transient expression system) were inserted into BsiWI/BssHII-digested pKM-MVSchw-ATU3. The corresponding MV-ATU3-Secto and MV-ATU3-T4-S2P3F vaccine candidates were efficiently rescued using a helper-cell-based system as described above. Independent viral clones were propagated in Vero NK cells, grew to high titers of above TCID₅₀/mL. The correct sequence of the insert was confirmed by Sanger sequencing of the ATU, indicating that insertion of cDNA encoding secreted forms of S into the Measles vector results in genetically stable MV recombinants. Infection of Vero NK cells with MV-ATU3-Secto and MV-ATU3-T4-S2P3F resulted in similar syncytia formation as infection with the parental MV Schwarz (not shown), indicating good fitness and as expected, absence of enhanced fusogenic activity of these viruses.

[0775] Spike ectodomain expression and secretion in Vero cells infected with recombinant MVs was confirmed by Western Blot analysis using polyclonal rabbit antisera raised against recombinant S protein of SARS-CoV-2 (unpublished). As expected, the full-length S2P3F protein was only detected in cell lysates (FIG. 19, middle panel). In contrast, Secto and T4-S2P3F were clearly detected both in lysates and supernatants of infected Vero cells at 39 h post-infection (FIG. 19, upper and middle panels), indicating efficient secretion. Consistently, Secto and T4-S2P3F proteins secreted in the cell culture medium migrated with a higher apparent molecular weight than their counterparts observed within cell lysates, in agreement with these glycoproteins undergoing maturation upon transfer from the ER to the Golgi prior to secretion. Noteworthy, T4-S2P3F was present at markedly higher levels in lysates and supernatants of infected cells than Secto, which confirms more accurate folding and/or increased stability of S ectodomain when T4 foldon-mediated trimerization is combined with the “2P” mutations and inactivation of the S1/S2 cleavage site.

[0776] Immunogenicity of MV-ATU3-T4-S2P3F can be investigated in IFNAR-KO mice as described for the full-length constructs, with respect to induction of neutralizing antibody responses as well as CD4+ and CD8+ T cell responses. Induction of Th1 biased-responses and evaluation of fine tuning of the responses induced by secreted T4-S2P3F versus membrane-anchored S2P3F can be confirmed. The efficiency of protection can be assessed by quantifying pulmonary viral loads after intranasal transduction with Ad5:Ace2 and challenge with SARS-CoV-2.

[0777] Immunogenicity and Protective Potential of Recombinant MV Schwarz Expressing SARS-CoV-2 Nucleoprotein, Alone or in Combination with SARS-CoV-2 Spike.

[0778] The plasmid pKM-ATU2-N_2019-nCoV (2019-nCoV=SARS-CoV-2), abbreviated as pKM2-nCoV_NP or pKM-ATU2-N, has been described in section entitled “Plasmid vector constructs and vaccine candidate rescue” and was generated by inserting the fully codon-optimized SARS-CoV2 nucleoprotein (N) cDNA (SEQ ID NO: 21) into BsiWI/BssHII-digested pKM-MVSchw-ATU2 which contains an additional transcription unit between the phosphoprotein and matrix genes of the MV Schwarz genome. pKM-ATU2-N_{MVopt} was similarly generated using a measles-optimized sequence (SEQ ID NO: 37) in an effort to fine-tune nucleotide composition and expression levels of the transgene and promote enhanced fitness and stability of the recombinant measles viruses.

[0779] The pKM-ATU2-N and pKM-ATU2-N_{MVopt} plasmids have been used to successfully rescue the single recombinant MV-ATU2-N and MV-ATU2-N_{MVopt} vaccine candidates using a helper-cell-based system as described above. Independent viral clones were propagated in Vero NK cells, grew to high titers of above 10 TCID₅₀/mL. The correct sequence of the insert was confirmed by Sanger sequencing of the ATU, indicating that both the fully codon-optimized and the measles-optimized SARS-CoV-2 N genes inserted at position ATU2 remarkably allow the production of stable MV vectors. Infection of Vero NK cells with MV-ATU2-N and MV-ATU2-N_{MVopt} resulted in similar syncytia formation as infection with the parental MV Schwarz (not shown), indicating good fitness of these viruses.

[0780] SARS-CoV-2 nucleoprotein expression in Vero cells infected with recombinant MV was confirmed by Western Blot analysis using polyclonal rabbit antisera raised against SARS-CoV-2 N protein (unpublished). As shown in FIG. 20, a major band of very high intensity, close to saturating detection levels, was detected for all samples with the expected apparent molecular mass of 45 kDa, indicating expression of full length N protein. Intensity of the major band was stronger for MV-ATU2-N_{MVopt} than for MV-ATU2-N. Other bands of lower molecular mass were also observed for MV-ATU2-N_{MVopt} that probably correspond to minor degradation fragments. Altogether, this indicated that SARS-CoV-2 nucleoprotein was efficiently expressed from fully codon-optimized and measles-optimized genes inserted in ATU2 of the Measles vector and that the fully codon-optimized gene most likely drove higher expression of the nucleoprotein.

[0781] Immunogenicity of MV-ATU3-N and MV-ATU3-N_{MVopt} can be investigated in IFNAR-KO mice as described for the MV-S constructs, by monitoring induction of CD4+ and CD8+ T cell response. IFN-γ producing T cells can be enumerated by ELISpot after stimulation by a peptide pool spanning the N protein. Cytokine production by CD4⁺ T cells and CD8⁺ T cells can be characterized by intracellular cytokine staining analyzed by flow cytometry, allowing the inventors to confirm induction of Th1 biased-responses. The efficiency of protection can be assessed by quantifying pulmonary viral loads after intranasal transduction with Ad5:Ace2 and challenge with SARS-CoV-2.

[0782] The plasmid pKM-ATU2-N and any of the pKM3-Spike constructs, notably S6P and derived variants (S6P3F, S6PΔF and SCC6P), can be digested with SaII restriction enzyme and ligated to produce a series of double recombinant pKM-N&S plasmids harboring fully codon-optimized SARS-CoV N and S genes. Similar pKM-N_{MVopt}&S_{MVopt} plasmids can be constructed with measles-optimized SARS-CoV N and S genes. These plasmids can be used to rescue dual recombinant MV-N&S vaccine candidates, which can be comparatively characterized in vitro as described above. Immunogenicity can be investigated in IFNAR-KO mice as described for single recombinant constructs, with respect to induction of CD4+ and CD8+ T cell responses targeting N and S peptide pools and of neutralizing antibodies. Since clinical studies have suggested a protective role for both humoral and cell-mediated immunity in recovery from SARS-CoV-2 infection (Del Valle, 2020), it can be investigated whether the dual recombinant MV-N&S vaccine candidates provide better protection against intranasal challenge with SARS-CoV-2 than their single recombinant parental candidates.

### B. Example 2

[0783] 1. Materials and Methods

### Cells and Viruses

[0784] Human embryonic kidney cells (HEK) 293T (ATCC CRL-3216), HEK293T7-NP helper cells (stably expressing MV-N and MV-P genes), African green monkey kidney cells (Vero) and Vero C1008 clone E6 (ATCC CRL-1586) were maintained at 37° C., 5% CO₂ in Dulbecco's modified Eagle medium (DMEM) (Thermo Fisher) supplemented with 5% (for Vero cells) or 10% (for HEK293T cells) heat-inactivated fetal bovine serum (FBS) (Corning), 100 units/ml of penicillin-streptomycin and 100 ug/ml of streptomycin. The SARS-CoV-2 BetaCoV/France/IDF0372/2020 strain was supplied by the National Reference Centre for Respiratory Viruses hosted by Institut Pasteur (Paris, France). The human sample from which strain BetaCoV/France/IDF0372/2020 was isolated has been provided by Dr. X. Lescure and Pr. Y. Yazdanpanah from the Bichat Hospital, Paris, France. The Mouse-adapated SARS-CoV-2 (MACo-3) has been described elsewhere.

[0785] Construction of pTM-MVSchwarz Expressing Modified SARS-CoV-2 S Protein Constructs

[0786] The SARS-CoV-2 spike (S) gene based on the sequence published by Zhou et al. (Zhou, 2020) was codon-optimized for expression in mammalian cells. Primers introducing restriction sites BsiWI and BssHII to the S 5′ and 3′ ends, respectively, were used to amplify nucleotides 1-3799 to generate full-length S (SF) with a deletion of its 11 C-terminal amino acids (SF-dER) (FIG. 21) for cloning into pCDNA 5.1. To generate S2 constructs, primers were designed for inverted PCR with BsmBI restriction sites and 4-nucleotide overlaps at the C-terminus of the native S signal peptide and S2 immediately adjacent to the furin cleavage site (Table 5A-5C). The amplification product, comprising the S2 region, the pCDNA backbone, and the S signal peptide, was digested with BsmBI (NEB) and self-ligated to generate S2-dER. To maintain the conformation of S in the prefusion state, two mutations were introduced at the hinge of HR1, K986P and V987P (2P mutation) (FIG. 21). Primers introducing the mutations were designed with mutated overlapping nucleotides and BsmBI sites (Tables 5A-5C). The SF-dER and S2-dER constructs were amplified, digested and self-ligated to create the prefusion-stabilized SF-2P-dER and S2-2P-dER constructs. The S constructs in the pCDNA background were transfected into Vero cells using FugeneHD. Transfected cells were observed at 24- and 48-hour post-transfection for fusogenic phenotypes.

[0787] All S genes were subsequently cloned into pTM-MVSchwarz encoding infectious MV cDNA corresponding to the anti-genome of the MV Schwarz vaccine strain. All the inserted genes were modified at the stop codon to ensure that the total number of nucleotides is a multiple of six (Calain, 1993).

### Virus Rescue, Propagation and Titration

[0788] Rescue of recombinant MV viruses was performed using a helper-cell-based system as described previously (Combredet, 2003). Briefly, helper HEK293T7-NP cells were individually transfected with 5 μg of pTM-MVSchwarz-based SARS-CoV-2 S plasmids and 0.02 μg of pEMC-La, plasmid expressing the MV polymerase (L) gene (Duprex, 2002). After overnight incubation at 37° C., the transfection medium was replaced with fresh DMEM medium. Heat shock was applied for 3 h at 42° C. before transfected cells were returned to the 37° C. incubator. After two days, transfected cells were transferred to 100-mm dishes seeded with monolayers of Vero cells. Syncytia that appeared after 2-3 days of co-culture were singly picked and transferred onto Vero cells seeded in 6-well plates. Infected cells were trypsinized and expanded in 75-cm² and then 150-cm² flasks, in DMEM with 5% FBS. When syncytia reached 80%-90% coverage (or when the maximum cytopathic effect (CPE) was observed, usually within 36-48 hours post infection), cells were scraped into a small volume of OptiMEM (Thermo Fisher). Cells were lysed by a single freeze-thaw cycle and cell lysates clarified by low-speed centrifugation. The infectious supernatant was then collected and stored at −80° C. Titers of the rMVs were determined on Vero cells seeded in 96-well plates at 7500 cells/well, and infected with serial ten-fold dilutions of virus in DMEM with 5% FBS. After incubation for 7 days, cells were stained with crystal violet, and TCID₅₀ values were calculated using the Karber method (Karber, 1931). Titers of SARS-CoV-2 and MACo3 were assessed on Vero-E6 in a similar plaque assay. The number of plaques were read 3 days post-infection.

[0789] Virus growth kinetics of rMVs was studied on monolayers of Vero cells in 6-well plates. Cells were infected with rMVs at an MOI of 0.1. One plate was used per rMV construct. At various time points post-infection, infected cells were scraped into 1 ml OptiMEM, lysed by freeze-thaw, clarified by centrifugation, and titered as described above.

[0790] To assess stability of S expression, cell lysates generated by a freeze-thaw cycle were used to infect Vero cells repeatedly for ten passages. Passage 1 (P1), P5 and P10 viruses were used to infect Vero in 6 well-plates in duplicate and assessed for S mRNA and protein levels using RT-PCR and western blotting, respectively.

### RT-PCR

[0791] To verify S expression from the rMV constructs, total RNA were extracted from infected Vero cells using the RNeasy Mini Kit (Qiagen). The cDNA synthesis and PCR steps were performed using the RNA LA PCR kit (Takara Bio) with primers (Tables 5A-5B) targeting ATU2 and ATU3, according to the manufacturer's instructions. RT-PCR products were verified by Sanger sequencing (Eurofins Genomics) using the primers indicated in Table 5C.

### Western Blot Analysis

[0792] Vero cells in 6-well plates were infected with various rMVs at an MOI of 0.1. At 36-48 h post-infection (80% syncytia), infected cells were lysed in RIPA lysis buffer (Thermo Fisher). Samples were briefly centrifuged and subjected to SDS-PAGE using the NuPAGE-pre-cast 4-12% gradient gel with NuPAGE-MOPs running buffer (Invitrogen). After transfer to a nitrocellulose membrane (GE Healthcare) and blocking with Tris-buffered saline (TBS) buffer with 0.1% Tween, 5% milk, the membrane was subsequently probed with a rabbit polyclonal anti-SARS-CoV S antibody recognizing the conserved 1124 aa-1140 aa epitope (ABIN199984, Antibody Online, 1:2000 dilution) followed by a horse-radish peroxidase (HRP)-conjugated swine anti-rabbit IgG antibody (P0399, Dako, 1:3000 dilution). Bands were visualized using SuperSignal West pico Plus chemiluminescent HRP substrate (Thermo Fisher). For loading control, membranes were stripped with 5% NaOH for 5 mins then blocked. Membranes were then re-probed with a mouse monoclonal anti-MV-N antibody (ab9397, Abcam, 1:20000 dilution) followed by an HRP-conjugated anti-mouse IgG (NA931V, GE Healthcare, 1:10000 dilution).

### Immunofluorescence Assay

[0793] Vero cells were infected with various rMVs at an MOI of 0.1. At 24-36 h post-infection, cells were fixed with 4% paraformaldehyde, blocked with 2% goat serum overnight and then treated with or without 0.1% saponin A (Sigma). Fixed cells were then probed with a mouse monoclonal anti-SARS-CoV S antibody (ab273433, Abcam, 1:300 dilution) as the primary antibody. An Alexa Fluor 488-conjugated goat anti-rabbit IgG (A-11008, Thermo Fisher) was used as the secondary antibody. Staining with anti-MV-N followed by Cy3-conjugated goat anti-rabbit (A10520, Jackson ImmunoResearch, 1:1000 dilution) was used to detect MV in the same infected cells. Nuclei were stained with DAPI. Images were collected using an inverted Leica DM IRB fluorescence microscope with a 20× objective.

### Flow Cytometry

[0794] pcDNA5.1 expression vectors encoding prefusion-stabilized or native conformation full-length S and S2 subunit antigens were used to transfect HEK293T cells using the JetPrime transfection kit (PolyPlus) according to the manufacturer's instructions. Forty-eight hours post-transfection, cells were stained for indirect immunofluorescence with 10 μg/ml of rabbit polyclonal anti-S antibody targeting S2 (ABIN199984) followed by Alexa Fluor 488-conjugated goat anti-rabbit IgG (A-11008). Propidium iodide was used to exclude dead cells by gating. Stained cells were acquired on the Attune NxT flow cytometer (Invitrogen) and data were analyzed using FlowJo v10.7 software (FlowJo LLC).

### Mice Immunizations and Challenge

[0795] All experiments were approved by the Office of Laboratory Animal Care at the Institut Pasteur and conducted in accordance with its guidelines. Groups of 6 to 8-week-old mice deficient for type-I IFN receptor (IFNAR^{-/-}) were intraperitoneally injected with 10⁵ TCID₅₀rMV, namely SF-2P-dER or S2-2P-dER in ATU2 or ATU3, or the control empty MV Schwarz. To study humoral responses, two immunizations were administered at a four-week interval. Sera were collected before the first immunization (day −1) and then before (day 28) and after (day 42) after the second immunization. All serum samples were heat-inactivated for 30 min at 56° C. To assess protection, mice that received either one or two immunizations were challenged with an intranasal inoculation of 1.5×10⁵ PFU mouse-adapted SARS-CoV-2 virus (MACo3). Three days after challenge, mice were sacrificed and lung samples collected. The presence of MACo3 virus in the lung was detected by determining viral growth, PFU of infectious viral particles, and measuring vRNA using Luna Universal Pr—be One-Step RT-qPCR kit following the manufacturer protocol (E3006). The primers and probes used correspond to the nCoV_IP4 panel (Table 5A-5C) as described on the WHO website (Protocol, Institut Pasteur, 2020).

TABLE 5A
Primers used for construction of SF-dER, S2-dER and
their 2P mutation counterparts.

| Primer name - | | |
|---|---|---|
| Construction | SEQ | |
| primers | ID NO | Sequence |
| BsiWI-Signal | 121 | TAACGTACGGCCACCATGTTCGTCTTTCTGGTATTG |
| BssHII-SF | 122 | TAAGCGCGCCTATTATTCGGAATCATCCTCATCGA |
| BsmBI-signal | 123 | TAACGTCTCCGCACTGGGAACTCACCAGAGGAAG |
| BsmBI-S2 - | 124 | TAACGTCTCAGTGCGTAGCAAGTCAGAGTATCATAG |
| BssHII-S2 | 125 | TAAGCGCGCTTATTCGGAATCATCCTCATCGAATTTAC |
| BsmBI-2P-fwd | 126 | AATCGTCTCACACCAGAGGCCGAAGTGCAGATTGATCGCCTG |
| BsmBI-2P-rev | 127 | ATACGTCTCAGGTGGGTCGAGCCGAGACAAGATGTCGTTC |

TABLE 5B
Primers used for sequencing of SF-dER, S2-dER and
their 2P mutation counterparts.

| Primer name - | | |
|---|---|---|
| Sequencing | SEQ | |
| primers | ID NO | Sequence |
| Signal-fwd1 | 128 | TCTGGTATTGCTTCCTCTGGTG |
| SF-fwd2 | 129 | TGCGCACTTGATCCATTGTC |
| S2-fwd3 | 130 | GTAAAGCACACTTCCCAAGAG |
| SF-fwd4 | 131 | GATCCTGGACATCACTCCATGC |
| SF-rev1 | 132 | TTCCACTTACATGGATAGCGTGG |
| S2-rev1 | 133 | TACTGTTATTACTATAAGCGACAG |
| S2-rev3 | 134 | GATCTCTAGCGGCGATATCTC |
| 3433 | 135 | GACCTTGGGAGGCAATCACT |
| oligo8a | 136 | GGAATCGCTGTCCTCAACAA |
| 9119 | 137 | ‘GATAGGG’TGCTAGTGAACCAAT |
| 9218 | 138 | TGGACCCTACGTTTTTCTTAATTCT |

TABLE 5C
Primers used for mouse-adapted SARS-CoV-2
vRNA detection.

| Primer name - | SEQ | |
|---|---|---|
| qRT-PCR primers | ID NO | Sequence |
| nCoV_IP4-14059Fw | 139 | GGTAACTGGTATGATTTCG |
| nCoV_IP4-14146Rv | 140 | CTGGTCAAGGTTAATATAGG |
| nCoV_IP4- | 141 | TCATACAAACCACGCCAGG |
| 14084Probe(+) | | [5']Hex [3']BHQ-119 |

### ELISA

[0796] Edmonston strain-derived MV antigens (Jena Bioscience) or recombinant S protein encompassing amino acid residues 16 to 1213 with R683A and R685A mutations (ABIN6952426, Antibodies Online) were coated on NUNC MAXISORP 96-well immuno-plates (Thermo Fisher) at 1 μg/ml in 1× phosphate-buffered saline (PBS). Coated plates were incubated overnight at 4° C., washed 3 times with washing buffer (PBS, 0.05% Tween), and further blocked for 1 h at 37° C. with blocking buffer (PBS, 0.05% Tween, 5% milk). Serum samples from immunized mice were serially diluted in the binding buffer (PBS, 0.05% Tween, 2.5% milk) and incubated on plates for 1 h at 37° C. After washing steps, an HRP-conjugated goat anti-mouse IgG (H+L) antibody (Jackson ImmunoResearch, 115-035-146, 1:5000 dilution) was added for 1 h at 37° C. Antibody binding was detected by addition of the TMB substrate (Eurobio) and the reaction was stopped with 100 μl of 30% H₂SO₄. The optical densities were recorded at 450 and 620 nm wavelengths using the EnSpire 2300 Multilabel Plate Reader (Perkin Elmer). Endpoint titers for each individual serum sample were calculated as the reciprocal of the last dilution giving twice the absorbance of the negative control sera. Isotype determination of the antibody responses was performed using HRP-conjugated isotype-specific (IgG1 or IgG2a) goat anti-mouse antibodies (AB97240 and AB97245, Abcam, 1:5000).

### Plaque Reduction Neutralization Test

[0797] Two-fold serial dilutions of heat-inactivated serum samples were incubated at 37 C for 1 h with 50 PFU of SARS-CoV-2 virus in DMEM medium without FBS and added to a monolayer of Vero E6 cells seeded in 24-well plates. Virus was allowed to adsorb for 2 h at 37° C. The supernatant was removed and the cells were overlaid with 1 ml of plaque assay overlay media (DMEM supplemented with 5% FBS and 1.5% carboxymethylcellulose). The plates were incubated at 37 C with 5% CO₂ for 3 days. Viruses were inactivated and cells were fixed and stained with a 30% crystal violet solution containing 20% ethanol and 10% formaldehyde (all from Sigma). Serum neutralization titer was counted on the dilution that reduced SARS-CoV-2 plaques by 50% (PRNT₅₀).

### ELISPOT

[0798] Splenocytes from immunized mice were isolated and red blood cells lysed using Hybri-Max Red Blood Cell Lysing Buffer (Sigma). The splenocytes were tested for their capacity to secrete IFN-γ upon specific stimulation. Multiscreen-HA 96-well plates (Millipore) were coated overnight at 4° C. with 100 μl per well of 10 μg/ml of anti-mouse IFN-γ (551216, BD Biosciences) in PBS before washing and blocking for 2 h at 37° C. with 200 μl complete MEM-α (MEM-α (Thermo Fisher) supplemented with 10% FBS, 1× non-essential amino acids, 1 mM sodium pyruvate, 2 mM L-glutamine, 10 mM HEPES, 1% penicillin-streptomycin, and 50 μM β-mercaptoethanol). The medium was replaced with 100 μl of cell suspension containing 1×10⁵ splenocytes in each well in triplicate and 100 μl of stimulating agent in complete MEM-α supplemented with 10 U/ml of mouse IL-2 (Roche). Stimulating agents used were 2.5 μg/ml concanavalin A (Sigma Aldrich) for positive controls, complete MEM-α for negative controls, MV Schwarz virus at an MOI of 1, or a SARS-CoV-2 S peptide pool (Tables 6A-6B) at 2 μg/ml per peptide. After incubation for 40 h at 37° C., 5% CO₂, plates were washed once with PBS, then three times with washing buffer (PBS, 0.05% Tween). A biotinylated anti-mouse IFN-γ antibody (554410, BD Biosciences) at 1 μg/ml in the washing buffer was added and plates were incubated for 120 min at room temperature. After extensive washing, 100 μl of streptavidin-alkaline phosphatase conjugate (Roche) was added at a dilution of 1:1000 and plates were further incubated for 1 h at room temperature. Wells were washed twice with the washing buffer and followed by a wash with PBS buffer without Tween. Spots were developed with BCIP/NBT (Sigma) and counted on a CTL ImmunoSpot® ELISPOT reader.

TABLE 6A
Peptide pools corresponding to the S1 and S2
subunits used to stimulate S-specific CD4⁺ T cells.

| CD4 peptide | SEQ | | Amino |
|---|---|---|---|
| sequence | ID NO | Subunit | acid position |
| QDLFLPFFSNVTWFH | 83 | S1 | 52-66 |
| STEIYQAGSTPCNGV | 84 | S1 | 469-483 |
| VLSFELLHAPATVCG | 85 | S1 | 512-526 |
| ENSVAYSNNSIAIPT | 86 | S2 | 702-716 |
| ITSGWTFGAGAALQI | 87 | S2 | 882-896 |
| QMAYRFNGIGVTQNV | 88 | S2 | 901-915 |
| GKIQDSLSSTASALG | 89 | S2 | 932-946 |
| IRAAEIRASANLAAT | 90 | S2 | 1013-1027 |
| GYHLMSFPQSAPHGV | 91 | S2 | 1046-1060 |
| PAQEKNFTTAPAICH | 92 | S2 | 1069-1083 |

TABLE 6B
Peptide pools corresponding to the
S1 and S2 subunits used to
stimulate S-specific CD8⁺ T cells.

| CD8 peptide | SEQ | | Amino acid |
|---|---|---|---|
| sequence | ID NO | Subunit | position |
| FVFLVLLPL | 93 | S1 | 2-10 |
| VNLTTRTOL | 94 | S1 | 16-24 |
| LFLPFFSNV | 95 | S1 | 54-62 |
| SNVTWFHAI | 96 | S1 | 60-68 |
| VTWFHAIHV | 97 | S1 | 62-70 |
| RGWIFGTTL | 98 | S1 | 102-110 |
| FQFCNDPFL | 99 | S1 | 133-141 |
| YSSANNCTF | 100 | S1 | 160-168 |
| VSQPFLMDL | 101 | S1 | 171-179 |
| KIYSKHTPI | 102 | S1 | 202-210 |
| INITRFQTL | 103 | S1 | 233-241 |
| AAAYYVGYL | 104 | S1 | 262-270 |
| VRFPNITNL | 105 | S1 | 327-335 |
| FNATRFASV | 106 | S1 | 342-350 |
| GNYNYLYRL | 107 | S1 | 447-455 |
| VGYQPYRVV | 108 | S1 | 503-511 |
| VVVLSFELL | 109 | S1 | 510-518 |
| VNFNFNGLT | 110 | S1 | 539-547 |
| YQDVNCTEV | 111 | S1 | 612-620 |
| SIIAYTMSL | 112 | S2 | 691-699 |
| VAYSNNSIA | 113 | S2 | 705-713 |
| FGGFNFSQI | 114 | S2 | 797-805 |
| AALQIPFAM | 115 | S2 | 892-900 |
| VVNQNAQAL | 116 | S2 | 951-959 |
| VVFLHVTYV | 117 | S2 | 1060-1068 |
| ISGINASVV | 118 | S2 | 1169-1177 |
| IWLGFIAGL | 119 | S2 | 1216-1224 |
| IAIVMVTIM | 120 | S2 | 1225-1233 |

### Intracellular Cytokine Staining

[0799] Splenocytes of vaccinated mice were extracted as previously described. Two million splenocytes per mouse per well were incubated in 200 μL of complete MEM-α medium (Thermo Fisher). ED Golgi Stop (554724, ED Biosciences) was added to the culture medium according to the manufacturer's instructions. Splenocytes were stimulated with a peptide pool covering the predicted CD4 and CD8 T-cell epitopes of the SARS-CoV-2 S protein (Table 6A-6B) at a final concentration of 2 μg/ml per peptide. PMA/lonomycin Cell Stimulation Cocktail (eBioscience) was used as a stimulation for positive controls, and medium alone was used for negative controls. Splenocytes were stimulated for 4 h at 37° C. Stimulated cells were incubated with Mouse BD Fc Block (553141, BD Biosciences), and stained with Live/Dead Fixable Aqua Viability Dye (ThermoFisher) to exclude dead cells by gating. Subsequently, cells were stained with CD3e PE (clone 145-2C11, 12-0031-83, eBioscience), CD4 PerCP-eFluor710 (clone RM4-5, 46-0042-82) and CD8 Alexa Fluor 488 (clone 53-6.7, 53-0081-82) antibodies from Invitrogen. Cells were fixed and permeabilized with BD Fixation/Permeabilization kit (BD Biosciences) and stained with IFN-γ APC/Fire750, (clone XMG1.2, 505860, BioLegend), TNF-α BV421 (clone MP6-XT22, 563387, BD Horizon) and IL-APC (clone TRFK5, 505860, BD Biosciences) antibodies. Samples were acquired using the Attune NxT flow cytometer (Invitrogen) and data were analyzed using FlowJo v10.7 software (FlowJo LLC).

### Statistical Information

[0800] Statistical analyses were performed using GraphPad Prism v.8.0.2. Results were considered significant if p<0.05. The lines in all graphs represent the geometric mean with error bars indicating geometric SD. Statistical analyses of antibody responses, ELISA and PRNT₅₀, were done using two-way ANOVA adjusted for multiple comparisons. The two-tailed nonparametric Mann-Whitney's U test was applied to compare differences between two groups.

[0801] 2. Results

### Design of SARS-CoV-2 S Antigens

[0802] Based on previous work from the inventors with MV expressing SARS-CoV-1 S (Escriou, 2014) and since SARS-CoV and SARS-CoV-2 S proteins share a high degree of similarity (Chan, 2020), the full-length S protein of SARS-CoV-2 was chosen as the main antigen to be expressed by the MV vector. The inventors introduced a number of modifications in the native S sequence to improve its expression and immunogenicity (FIG. 21). First, the RNA sequence was codon-optimized to increase its expression in human cells. Second, the inventors substituted two amino acids with prolines, K986P and V987P, in the S2 region to generate a subset of 2P constructs, following a proven strategy to stabilize the S protein in its prefusion conformation, increasing its expression and immunogenicity (Kirchdoerfer, 2018; Pallesen, 2017; Wrapp, 2020). Third, to increase the surface expression of the S protein in MV-infected cells, the inventors deleted the 11 C-terminal amino acids (aa 1263-1273) from the S cytoplasmic tail to generate dER constructs. The cytoplasmic tail of coronaviruses S proteins contains one or two distinct retention signals: the endoplasmic reticulum retrieval signal (ERRS) comprising KxHxx of SEQ ID NO: 149 or KKxx motifs, and the tyrosine-dependent localization signal Yxxϕ (Ujiker, 2016). S proteins with ERRS are recruited into coatomer complex I (COPI) and recycled from the Golgi to the ER in retrograde. Thus, the repeated cycling of S proteins between the ER and the Golgi leads to S protein intracellular retention, while mutant S proteins lacking the ERRS are transported to the plasma membrane (McBride, 2007; Ujike, 2015). Similarly, the S proteins of Alphacoronaviruses with the Yxxϕ motif are retained in the ER with little or no S protein trafficking to the cell surface (Schwegmann-Wessels, 2004). The inventors therefore designed their SARS-CoV-2 S antigens with the deletion of all possible retention signals from the cytoplasmic tail.

[0803] To investigate the possibility of generating a broad-spectrum vaccine targeting both SARS-CoV-1 and SARS-CoV-2 clinical isolates, the inventors also designed S2 subunit antigens (FIG. 22a). The S2 subunit of SARS-CoV-2 is highly conserved among SARS-like CoVs and shares 99% identity with those of bat SARS-like CoVs (SL-CoV ZXC21 and ZC45) and of a human SARS-CoV-1 (Chan, 2020). The inventors therefore designed S2 subunit antigens, both in its native trimer and prefusion-stabilized form, with the signal peptide of the S protein inserted in the N-terminus to target the antigen to the cell surface.

[0804] Altogether, the inventors designed four different SARS-CoV-2 S constructs (FIG. 22a): 1) the native-conformation full-length S trimer (SF-dER); 2) the prefusion-stabilized full-length S (SF-2P-dER); 3) the native conformation trimer S2 subunit (S2-dER); and 4) the prefusion-stabilized S2 subunit (S2-2P-dER).

### Expression Profile of SARS-CoV-2 S Antigens

[0805] Full-length S and S2 sequences were firstly cloned into pCDNA and transfected into HEK293T cells to verify expression and assess surface protein localization by surface staining followed by flow cytometry. Prefusion-stabilized S constructs were observed to localize more strongly to the surface of transfected cells (FIG. 28). Functionality of the S proteins was analyzed by transfecting the same pCDNA vectors in Vero cells, which express ACE-2. Once S proteins bound to ACE-2 receptors, activation of the fusion protein can be observed through the formation of large syncytia among cells. Vero cells expressing the native S protein (full-length S with an intact CT) exhibited significant syncytium formation (FIG. 29), indicating that functional S proteins were expressed on the cell surface. Notably, the SdER mutants induced increased fusion compared to native SF, confirming the expected increased surface expression of the S protein when the ERRS is deleted. Interestingly, expression of the S2 subunit alone resulted in a hyper-fusion phenotype in Vero cells. This suggests the triggering of non-receptor-mediated membrane fusion by proteases cleaving at the S2′ site and freeing the fusion peptide. On the contrary, both the 2P-stabilized SF-2P-dER and S2-2P-dER did not induce syncytium formation, indicating that their fusion activity was abrogated by the 2P mutation.

Generation of rMVs Expressing SARS-CoV-2 S and S2 Proteins

[0806] The four antigenic constructs were individually cloned into the pTM-MVSchwarz plasmid at additional transcription units (ATU), with ATU2 located between the P and M genes of the MV genome and ATU3 between the H and L genes (Combredet, 2003) (FIG. 22a). Due to the decreasing expression gradient of MV genes cloning in ATU2 allows high-level expression of the antigen while cloning in ATU3 results in lower levels of expression (Plumet, 2005). The lower expression from ATU3 is a trade-off to facilitate rescue of rMV encoding antigens that are toxic or difficult to express.

[0807] All rMVs expressing the S proteins were successfully rescued by reverse genetics and propagated in Vero cells. Although the rMVs exhibited slightly delayed growth kinetics, final virus yields were high and identical to that of the parental MV Schwarz (˜10⁷ TCID₅₀/ml) (FIG. 22b). The expression of S antigens was detected in infected Vero cells by western blotting (WB) and immunofluorescence staining (IF) (FIGS. 22c, d and FIGS. 30 and 31). As expected, much higher antigen expression was observed from ATU2 vectors compared to ATU3 (FIG. 22c).

[0808] When using recombinant viral vectors as vaccines, the genetic stability of constructs is a major concern as it guarantees the effectiveness of the vaccine after multiple manufacturing steps. Such analysis of rMVs after serial passaging in Vero cells revealed that MV-ATU2-SF-dER, which expresses the native S from ATU2, was unstable, with loss of S expression by passage 5 (FIG. 32). In contrast, its 2P counterpart was stably and efficiently expressed up to passage 10. Therefore, the inventors discarded the vaccine candidates expressing native S and selected those expressing the prefusion-stabilized SF-2P and S2-2P constructs for further immunogenicity studies.

### Induction of SARS-CoV-2 Neutralizing Antibodies in Mice

[0809] The inventors investigated the immunogenicity of selected rMV vaccine candidates in IFNAR −/− mice susceptible to MV infection (Mura, 2018). Animals were immunized by one or two intraperitoneal administrations of the rMV candidates at 1×10⁵ TCID₅₀ on days 0 and 30 (FIG. 23a). Empty MV Schwarz was used for control vaccination. Mice sera were collected 4 weeks after the prime and 12 days after the boost. The presence of S- and MV-specific IgG antibodies was assessed by indirect ELISA using SARS-CoV-2 S recombinant protein and native MV antigens, respectively.

[0810] All animals raised high MV-specific IgG antibodies after prime at comparable titers in all groups (˜10⁴-10⁵ IgG titer), indicating efficient vaccine take in all the animals (FIG. 23b). Boost immunization increased MV-specific antibody titers in all groups, indicating that all animals received a successful prime-boost vaccination. Specific IgG antibodies to SARS-CoV-2 S were detected in 100% of immunized mice. Interestingly, rMVs expressing SF-2P-dER or S2-2P-dER antigens from ATU2 elicited higher levels of anti-S antibodies than the ATU3 vectors, particularly after boosting (FIG. 23c). Pre-immune sera and sera from control animals that received empty MV remained negative for anti-S antibodies (data not shown).

[0811] The inventors next assessed the presence of SARS-CoV-2 neutralizing antibodies (NAbs) using plaque reduction neutralization tests (PRNT) with SARS-CoV-2 virus infection of Vero E6 monolayers. After the prime, SARS-CoV-2 NAbs were found in all mice immunized with SF-2P-dER expressed from ATU2 but only one mouse immunized with the ATU3 construct (FIG. 23d). After the second immunization, NAb titers increased in both groups, with the ATU2 group exhibiting ten-fold higher NAb titers compared to the ATU3 group. No NAbs were detected in animals immunized with the S2 candidates despite the high levels of anti-S antibodies (FIG. 23c).

[0812] As IgG isotype switching can serve as indirect indicators of Th1 and Th2 responses (Finkelman, 1990), the inventors determined S-specific IgG1 and IgG2a isotype titers in the sera of immunized mice (FIGS. 23f, g). Similar to previous results from the inventors (Escriou, 2014), rMV candidates elicited significantly higher IgG2a antibody titers than IgG1, reflecting a predominant Th1-type immune response (FIGS. 23f, g). Since activated T cells play important roles in shaping Th1 and Th2 cytokine production, the inventors analyzed S-specific T-cell responses in MV-immunized mice in more detail.

### Induction of S-Specific T-Cell Responses

[0813] Cell-mediated immune responses elicited by immunization were first investigated using an IFN-γ ELISPOT assay. Groups of IFNAR^{-/-} mice were sacrificed one week after prime immunization (FIG. 24a). To evaluate S-specific responses, splenocytes were stimulated ex vivo with a pool of synthetic peptides covering the predicted CD8⁺ and CD4⁺ T-cell epitopes of the SARS-CoV-2 S protein, matching the MHC-I H-2K^{b}/H-2D^{b} and MHC-II I-A^{b} haplotype of 129sv IFNAR^{-/-} mice (Table 6A and 6B). Splenocytes were also stimulated with an empty MV virus to detect MV vector-specific T-cell responses.

[0814] High levels of T-cell responses to SARS-CoV-2 S and MV were elicited early after prime vaccination (FIG. 24). Splenocytes from mice vaccinated with MV-ATU2-SF-2P-dER yielded remarkably high IFN-γ secretion levels after stimulation with an MHC class I-restricted S peptide pool, yielding around 2,500 spot forming cells (SFC) per 10⁶ splenocytes. Lower IFN-γ responses were observed upon stimulation with MHC class II-restricted S peptides, at approximately 400 SFC/10⁶ splenocytes (FIGS. 24b, c). Splenocytes of these mice also exhibited relatively low vector-specific IFN-γ responses (˜990 SFC/10⁶ splenocytes), indicating a well-balanced S-to-MV vector response ratio (FIG. 24d). The ATU3 counterpart of the same vaccine tended to generate more vector-specific IFN-γ secreting cells (˜1,320 SFC/10⁶ splenocytes), while at the same time being less efficient in producing S-specific IFN-γ secreting cells after stimulation with MHC class II-restricted S peptides (˜130 SFC/10⁶ splenocytes). While IFN-γ responses after stimulation with MHC class I-restricted S peptides were not significantly different from those of its ATU2 counterpart (˜1,980 SFC/10⁶ splenocytes), the S-to-MV vector response ratio was significantly higher for MV-ATU2-SF-2P-dER (FIG. 24b).

[0815] In contrast, S-specific IFN-γ responses elicited by S2-only constructs were low after stimulation with either of the S peptide pools (FIGS. 24c, d). S-to-MV vector response ratios also remained very low in these animals, suggesting that immunization with the S2 protein subunit alone might be not sufficient to induce strong protective cellular immune responses (FIGS. 24e, f). MV-ATU3-S2-2P-dER and empty MV were unable to induce S-specific IFN-γ responses.

[0816] The inventors next studied S-specific CD4⁺ and CD8⁺ T cells by flow cytometric analysis after intracellular cytokine staining (ICS). S-specific IFN-γ⁺ and TNF-α⁺ responses were observed in for CD8⁺ T cells, while CD4⁺ T cells responded poorly to S peptide pool stimulation (FIGS. 25a, b). Similar to the ELISPOT results, SF-2P-dER expressed from ATU2 or ATU3 induced remarkably high and comparable percentages of S-specific IFN-γ⁺ and TNF-α⁺ CD8⁺ T cells, while the S2 protein expressed from ATU2 was ten times less immunogenic. MV-ATU3-S2-2P-dER and empty MV were unable to induce S-specific IFN-γ- or TNF-α-producing T-cells. IL-5-secreting cells (indicative of a Th2-biased response) were not detected in any of the immunization groups. An additional detailed analysis of T cell responses in mice immunized with MV-ATU2-SF-2P-dER confirmed the strong stimulation of CD8 compartment with high levels of S-specific IFN-γ⁺ and TNF-α⁺ producing CD8⁺ T cells, as well as double positive IFN-γ⁺/TNF-α⁺ producing CD8⁺ T cells. No IL-5 or IL-13 was detected in CD4⁺ or CD8⁺ T cells, as well as in CD4⁺/CD44⁺/CD62L⁻ memory T cells, confirming that S-specific memory T cells are also Th1-oriented (FIG. 33).

[0817] Taken together, these results demonstrate that MV-ATU2-SF-2P-dER induces a robust Th1-driven T-cell immune response to SARS-CoV-2 S antigens at significantly higher levels than MV-ATU3-SF-2P-dER. The S2 candidates elicited much lower cellular responses, as observed previously with NAb levels, indicating that S2 alone is not sufficient to induce an efficient immune response in these mice. The inventors therefore excluded the S2 candidates from further analysis.

Persistence of Neutralizing Antibodies and Protection from Intranasal Challenge

[0818] The inventors monitored the persistence of anti-S antibodies in mice immunized twice with either MV-ATU2-SF-2P-dER or MV-ATU3-SF-2P-dER (FIG. 26a). As usually observed for MV responses (FIG. 26b), S-specific IgG titers persisted and stabilized at high levels (10⁵-10⁶ limiting dilution titers) for both ATU2 and ATU3 candidates for up to three months after boosting (FIG. 26c). However, immunization with the ATU2 construct resulted in significantly higher levels of S-specific IgG and NAb titers (10³-10⁴ limiting dilution titers) over the duration of the experiment (FIG. 26d).

[0819] To determine whether these responses confer protection from SARS-CoV-2 infection, immunized mice were challenged intranasally with 1.5×10⁵ PFU of MACo3, a mouse-adapted SARS-CoV-2 virus. Three days after challenge, mice were sacrificed and the presence of virus was examined in lung homogenates. SARS-CoV-2 RNA was measured by RT-qPCR using RdRP gene-specific primers (Protocol, Institut Pasteur, 2020) (Table 5A-5C), and infectious virus levels were titered on Vero E6 cells. SARS-CoV-2 viral RNA was detected in the lungs of all immunized mice after challenge, with the ATU2 group showing an average 2 log₁₀ reduction and the ATU3 group a 1 log₁₀ reduction compared to the empty MV control group (FIG. 26e). However, no infectious virus was detected in the lungs of the ATU2 group and all but one of the ATU3 group (FIG. 26f). These results demonstrate that, although viral replication occurred at low levels, infectivity of the inoculated and progeny virus was efficiently neutralized.

Partial Protection from Intranasal Challenge after a Single Immunization

[0820] The inventors next determined whether a single immunization could protect IFNAR^{-/-} mice from challenge with the MACo3 virus (FIG. 27a). Immunized animals were examined for immune responses on days 28 and 48 post-immunization, prior to challenge. All animals exhibited MV- and S-specific antibodies (FIGS. 27b, c). Th1-associated IgG responses to the S antigen as well as SARS-CoV-2 NAbs were present before challenge, although at lower levels than after two immunizations (FIGS. 27d, e). Mice were then challenged intranasally and lung samples collected 3 days after challenge. Although no difference was observed in viral RNA levels between the test and control groups (FIG. 27f), half of the animals immunized with MV-ATU2-SF-2P-dER were negative for infectious virus in the lungs (FIG. 27g), indicating partial protection even after a single administration. In contrast, animals immunized with MV-ATU3-SF-2P-dER were not protected after a single administration. However after prime/boost, both constructs were found protective (FIG. 26).

[0821] 3. Discussion

[0822] Here the inventors reported the development and testing of MV-based COVID-19 vaccine candidates targeting the SARS-CoV-2 S protein. Similar to other vaccine platforms, the full-length prefusion-stabilized S was the most immunogenic, eliciting the strongest humoral and cellular responses. Their lead candidate MV-ATU2-SF-2P-dER elicited high levels of neutralizing antibodies to SARS-CoV-2 and strong Th1-oriented Tcell reponses. Prime-boost immunization afforded protection from intranasal challenge with a mouse-adapted SARS-CoV-2 virus. Moreover, NAb titers persisted months after the immunization—such long-lasting immunity is a hallmark of replicating vector vaccines (Amanna, 2007). T-cell responses, essential to controlling and reducing viral load and viral spread (Rydyznski, 2020), were induced within seven days after a single immunization. Notably, dominance of Th1 responses suggested that these vaccine candidates were less likely to induce immunopathology due to vaccine-induced disease enhancement as previously reported for SARS-CoV-1 and MERS-CoV vaccine studies (Roberts, 2010; Luo, 2018; Qin, 2006; Niu, 2018; Zhang, 2016). In addition, after a single immunization, their lead candidate MV-ATU2-SF-2P-dER also provided sufficient immune protection according to WHO recommendations for a COVID-19 vaccine primary efficacy of at least 50% (Considerations for evaluation of COVID19, WHO, 2020). This suggests that their lead vaccine candidate could protect against both SARS-CoV-2 infection and disease.

[0823] To explore the possibility of generating a broad-spectrum vaccine, the inventors also tested a vaccine candidate expressing only the S2 subunit, which is highly conserved among SARS-CoV-1 and SARS-CoV-2 viruses. The S2 subunit has been shown to harbor immunodominant and neutralizing epitopes (Zhang, 2004; He, 2004; Wang, 2020). In this report, while S2 in the MV context induced high S-specific antibody titers, these antibodies could not neutralize the SARS-CoV-2 virus. In terms of cellular responses, S2 did not induce S-specific CD4⁺, CD8⁺ or IL-5⁺ T-cell responses. These observations suggested that the S2 subunit alone was insufficient for inducing immune protection. Given the high titers of non-neutralizing antibodies, it would be interesting to characterize their role in immune responses to SARS-CoV-2 infection and investigate whether they may contribute to immunopathology.

[0824] The results of the inventors also yielded interesting differences in the immunogenicity of rMV vaccines expressing the target antigen from ATU2 versus ATU3. S antigen was expressed at higher levels from ATU2, and this correlated with higher humoral and cellular responses. Reducing the immunization dose of the ATU2 candidate to 1×10⁴ TCID₅₀ still induced higher NAb titers than the ATU3 vaccine at 1×10⁵ TCID₅₀ (FIG. 34). Additionally, T-cell responses to the MV vector was also lower with ATU2 constructs. These observations suggested that higher antigen expression could be reducing virus replication in vivo, resulting in lower cellular responses to the vector itself. While MV vaccines have been shown to be effective despite pre-existing immunity to the vector, this more desirable balance in the immunogenicity of antigen and vector likely contributes to greater vaccine efficacy of the ATU2 construct. Nevertheless, as an rMV vehicle for future vaccines, the ATU3 concept is still useful for expressing antigens that are unstable, toxic, or otherwise difficult to express.

### BIBLIOGRAPHY

[0825] Combredet, C., V. Labrousse, L. Mollet, C. Lorin, F. Delebecque, B. Hurtrel, H. McClure, M. B. Feinberg, M. Brahic and F. Tangy (2003). “A molecularly cloned Schwarz strain of measles virus vaccine induces strong immune responses in macaques and transgenic mice.” J Virol 77(21): 11546-54.
[0826] Escriou, N., B. Callendret, V. Lorin, C. Combredet, P. Marianneau, M. Fevrier and F. Tangy (2014). “Protection from SARS coronavirus conferred by live measles vaccine expressing the spike glycoprotein.” Virology 452-453: 32-41.
[0827] Reed, L. J. and H. Muench (1938). “A simple method of estimating fifty percent endpoints.” Am. J. Hyg. 27: 493-497.
[0828] Reuter et al, PLoS ONE, 2012, 7(3), e33989, I-8.
[0829] Ku et al. (2021) Cell Host & Microbe—for challenge model with Ad5:hACE2.
[0830] Hsieh et al. (2020) Science 369, 1501-1505.
[0831] MCCallum et al. (2020) Nat. Struct. Mol. Biol., 27, 942-949.
[0832] Buchrieser et al. (2020) EMBO Journal, 39:e106267.
[0833] Plumet (2005) J. Virol (2005) 79(11):6900-8.
[0834] Del Valle (2020), Nat Med., Chen, J. Clin. Invest., 2020.
[0835] Xiong et al (2020), Nature Structural & Molecular Biology.
[0836] Combredet, C., V. Labrousse, L. Mollet, C. Lorin, F. Delebecque, B. Hurtrel, H. McClure, M. B. Feinberg, M. Brahic and F. Tangy (2003). “A molecularly cloned Schwarz strain of measles virus vaccine induces strong immune responses in macaques and transgenic mice.” J Virol 77(21): 11546-54.
[0837] Escriou, N., B. Callendret, V. Lorin, C. Combredet, P. Marianneau, M. Fevrier and F. Tangy (2014). “Protection from SARS coronavirus conferred by live measles vaccine expressing the spike glycoprotein.” Virology 452-453: 32-41.
[0838] Reed, L. J. and H. Muench (1938). “A simple method of estimating fifty percent endpoints.” Am. J. Hyg. 27: 493-497.
[0839] The GDP@Risk over five years from COVID-19 could range from $3.3 trillion to $82 trillion, says the Centre for Risk Studies www.jbs.cam.ac.uk/insight/2020/economic-impact/. In: Brain food/Economic impact) (2020).
[0840] Callaway E, Cyranoski D. China coronavirus: Six questions scientists are asking. Nature 577, 605-607 (2020).
[0841] Graham B S. Rapid COVID-19 vaccine development. Science (New York, N.Y.) 368, 945-946 (2020).
[0842] Zhou P, et al. A pneumonia outbreak associated with a new coronavirus of probable bat origin. Nature 579, 270-273 (2020).
[0843] Wu F, et al. A new coronavirus associated with human respiratory disease in China. Nature 579, 265-269 (2020).
[0844] Jaimes J, Millet J, Whittaker G. Proteolytic Cleavage of the SARS-CoV-2 Spike Protein and the Role of the Novel S1/S2 Site. Ssrn, 3581359 (2020).
[0845] Hoffmann M, et al. SARS-CoV-2 Cell Entry Depends on ACE2 and TMPRSS2 and Is Blocked by a Clinically Proven Protease Inhibitor. Cell 181, 271-280.e278 (2020).
[0846] Du L, He Y, Zhou Y, Liu S, Zheng B J, Jiang S. The spike protein of SARS-CoV—a target for vaccine and therapeutic development. Nature reviews Microbiology 7, 226-236 (2009).
[0847] Escriou N, et al. Protection from SARS coronavirus conferred by live measles vaccine expressing the spike glycoprotein. Virology 452-453, 32-41 (2014).
[0848] Liniger M, et al. Induction of neutralising antibodies and cellular immune responses against SARS coronavirus by recombinant measles viruses. Vaccine 26, 2164-2174 (2008).
[0849] Bodmer B S, Fiedler A H, Hanauer J R H, Prüfer S, Mühlebach M D. Live-attenuated bivalent measles virus-derived vaccines targeting Middle East respiratory syndrome coronavirus induce robust and multifunctional T cell responses against both viruses in an appropriate mouse model. Virology 521, 99-107 (2018).
[0850] Zhu F C, et al. Safety, tolerability, and immunogenicity of a recombinant adenovirus type-5 vectored COVID-19 vaccine: a dose-escalation, open-label, non-randomised, first-in-human trial. Lancet (London, England) 395, 1845-1854 (2020).
[0851] Bosch B J, et al. Severe acute respiratory syndrome coronavirus (SARS-CoV) infection inhibition using spike protein heptad repeat-derived peptides. Proceedings of the National Academy of Sciences of the United States of America 101, 8455-8460 (2004).
[0852] Keng C T, et al. Amino acids 1055 to 1192 in the S2 region of severe acute respiratory syndrome coronavirus S protein induce neutralizing antibodies: implications for the development of vaccines and antiviral agents. Journal of virology 79, 3289-3296 (2005).
[0853] Lip K M, et al. Monoclonal antibodies targeting the HR2 domain and the region immediately upstream of the HR2 of the S protein neutralize in vitro infection of severe acute respiratory syndrome coronavirus. Journal of virology 80, 941-950 (2006).
[0854] Zhang H, et al. Identification of an antigenic determinant on the S2 domain of the severe acute respiratory syndrome coronavirus spike glycoprotein capable of inducing neutralizing antibodies. Journal of virology 78, 6938-6945 (2004).
[0855] Zhong X, et al. B-cell responses in patients who have recovered from severe acute respiratory syndrome target a dominant site in the S2 domain of the surface spike glycoprotein. Journal of virology 79, 3401-3408 (2005).
[0856] Frantz P N, Teeravechyan S, Tangy F. Measles-derived vaccines to prevent emerging viral diseases. Microbes Infect 20, 493-500 (2018).
[0857] Ramsauer K, et al. Immunogenicity, safety, and tolerability of a recombinant measles-virus-based chikungunya vaccine: a randomised, double-blind, placebo-controlled, active-comparator, first-in-man trial. The Lancet Infectious diseases 15, 519-527 (2015).
[0858] Reisinger E C, et al. Immunogenicity, safety, and tolerability of the measles-vectored chikungunya virus vaccine MV-CHIK: a double-blind, randomised, placebo-controlled and active-controlled phase 2 trial. Lancet (London, England) 392, 2718-2727 (2019).
[0859] Mateo M, et al. Vaccines inducing immunity to Lassa virus glycoprotein and nucleoprotein protect macaques after a single shot. Science translational medicine 11, (2019).
[0860] Nümberger C, Bodmer B S, Fiedler A H, Gabriel G, Mühlebach M D. A Measles Virus-Based Vaccine Candidate Mediates Protection against Zika Virus in an Allogeneic Mouse Pregnancy Model. Journal of virology 93, (2019).
[0861] Malczyk A H, et al. A Highly Immunogenic and Protective Middle East Respiratory Syndrome Coronavirus Vaccine Based on a Recombinant Measles Virus Vaccine Platform. Journal of virology 89, 11654-11667 (2015).
[0862] Chan J F, et al. Genomic characterization of the 2019 novel human-pathogenic coronavirus isolated from a patient with atypical pneumonia after visiting Wuhan. Emerging microbes & infections 9, 221-236 (2020).
[0863] Kirchdoerfer R N, et al. Stabilized coronavirus spikes are resistant to conformational changes induced by receptor recognition or proteolysis. Scientific reports 8, 15701 (2018).
[0864] Pallesen J, et al. Immunogenicity and structures of a rationally designed prefusion MERS-CoV spike antigen. Proceedings of the National Academy of Sciences of the United States of America 114, E7348-e7357 (2017).
[0865] Wrapp D, et al. Cryo-EM structure of the 2019-nCoV spike in the prefusion conformation. Science (New York, N.Y.) 367, 1260-1263 (2020).
[0866] Ujike M, Huang C, Shirato K, Makino S, Taguchi F. The contribution of the cytoplasmic retrieval signal of severe acute respiratory syndrome coronavirus to intracellular accumulation of S proteins and incorporation of S protein into virus-like particles. The Journal of general virology 97, 1853-1864 (2016).
[0867] McBride C E, Li J, Machamer C E. The cytoplasmic tail of the severe acute respiratory syndrome coronavirus spike protein contains a novel endoplasmic reticulum retrieval signal that binds COPI and promotes interaction with membrane protein. Journal of virology 81, 2418-2428 (2007).
[0868] Ujike M, Taguchi F. Incorporation of spike and membrane glycoproteins into coronavirus virions. Viruses 7, 1700-1725 (2015).
[0869] Schwegmann-Wessels C, et al. A novel sorting signal for intracellular localization is present in the S protein of a porcine coronavirus but absent from severe acute respiratory syndrome-associated coronavirus. The Journal of biological chemistry 279, 43661-43666 (2004).
[0870] Combredet C, et al. A molecularly cloned Schwarz strain of measles virus vaccine induces strong immune responses in macaques and transgenic mice. Journal of virology 77, 11546-11554 (2003).
[0871] Plumet S, Duprex W P, Gerlier D. Dynamics of viral RNA synthesis during measles virus infection. Journal of virology 79, 6900-6908 (2005).
[0872] Mura M, Ruffie C, Billon-Denis E, Combredet C, Tournier J N, Tangy F. hCD46 receptor is not required for measles vaccine Schwarz strain replication in vivo: Type-I IFN is the species barrier in mice. Virology 524, 151-159 (2018).
[0873] Finkelman F D, et al. Lymphokine control of in vivo immunoglobulin isotype selection. Annual review of immunology 8, 303-333 (1990).
[0874] Protocol: Real-time RT-PCR assays for the detection of SARS-CoV-2 Institut Pasteur, Paris.). Protocol: Real-time RT-PCR assays for the detection of SARS-CoV-2 Institut Pasteur, Paris (2020).
[0875] Amanna I J, Carlson N E, Slifka M K. Duration of humoral immunity to common viral and vaccine antigens. The New England journal of medicine 357, 1903-1915 (2007).
[0876] Rydyznski Moderbacher C, et al. Antigen-Specific Adaptive Immunity to SARS-CoV-2 in Acute COVID-19 and Associations with Age and Disease Severity. Cell, (2020).
[0877] Roberts A, et al. Immunogenicity and protective efficacy in mice and hamsters of a beta-propiolactone inactivated whole virus SARS-CoV vaccine. Viral Immunol 23, 509-519 (2010).
[0878] Luo F, Liao F L, Wang H, Tang H B, Yang Z Q, Hou W. Evaluation of Antibody-Dependent Enhancement of SARS-CoV Infection in Rhesus Macaques Immunized with an Inactivated SARS-CoV Vaccine. Virol Sin 33, 201-204 (2018).
[0879] Qin E, et al. Immunogenicity and protective efficacy in monkeys of purified inactivated Vero-cell SARS vaccine. Vaccine 24, 1028-1034 (2006).
[0880] Niu P, et al. A novel human mAb (MERS-GD27) provides prophylactic and postexposure efficacy in MERS-CoV susceptible mice. Sci China Life Sci 61, 1280-1282 (2018).
[0881] Zhang N, et al. Identification of an ideal adjuvant for receptor-binding domain-based subunit vaccines against Middle East respiratory syndrome coronavirus. Cell Mol Immunol 13, 180-190 (2016).
[0882] CONSIDERATIONS FOR EVALUATION OF COVID19 VACCINESFORWHO EUL v24092020. (ed Vaccine and Immunization Devices Assessment Team (VAX) PUP, Regulation and Prequalification Department (RPQ), Access to Medicineand Health Products (MHP), World Health Organization, Geneva, Switzerland) (2020).
[0883] He Y, et al. Identification of immunodominant sites on the spike protein of severe acute respiratory syndrome (SARS) coronavirus: implication for developing SARS diagnostics and vaccines. J Immunol 173, 4050-4057 (2004).
[0884] Wang Q, Qiu Y, Li J Y, Zhou Z J, Liao C H, Ge X Y. A Unique Protease Cleavage Site Predicted in the Spike Protein of the Novel Pneumonia Coronavirus (2019-nCoV) Potentially Related to Viral Transmissibility. Virol Sin 35, 337-339 (2020).
[0885] Print R D B. Draft landscape of COVID-19 candidate vaccines.). World Health Organization (2020).
[0886] Ahi Y S, Bangari D S, Mittal S K. Adenoviral vector immunity: its implications and circumvention strategies. Curr Gene Ther 11, 307-320 (2011).
[0887] Folegatti P M, et al. Safety and immunogenicity of the ChAdOx1 nCoV-19 vaccine against SARS-CoV-2: a preliminary report of a phase 1/2, single-blind, randomised controlled trial. Lancet (London, England) 396, 467-478 (2020).
[0888] Zuniga A, et al. Attenuated measles virus as a vaccine vector. Vaccine 25, 2974-2983 (2007).
[0889] Domingo C, et al. Long-term immunity against yellow fever in children vaccinated during infancy: a longitudinal cohort study. The Lancet Infectious diseases 19, 1363-1370 (2019).
[0890] Pebody R G, et al. Immunogenicity of second dose measles-mumps-rubella (MMR) vaccine and implications for serosurveillance. Vaccine 20, 1134-1140 (2002).
[0891] Mura M, Combredet C, Najburg V, Sanchez David R Y, Tangy F, Komarova A V. Nonencapsidated 5′ Copy-Back Defective Interfering Genomes Produced by Recombinant Measles Viruses Are Recognized by RIG-1 and LGP2 but Not MDA5. Journal of virology 91, (2017).
[0892] Sankoh O, et al. The non-specific effects of vaccines and other childhood interventions: the contribution of INDEPTH Health and Demographic Surveillance Systems. Int J Epidemiol 43, 645-653 (2014).
[0893] Benn C S, FiskerAB, Whittle H C, Aaby P. Revaccination with Live Attenuated Vaccines Confer Additional Beneficial Nonspecific Effects on Overall Survival: A Review. EBioMedicine 10, 312-317 (2016).
[0894] Aaby P, et al. Non-specific effects of standard measles vaccine at 4.5 and 9 months of age on childhood mortality: randomised controlled trial. BMJ 341, c6495 (2010).
[0895] Buitrago-Garcia D, et al. Occurrence and transmission potential of asymptomatic and presymptomatic SARS-CoV-2 infections: A living systematic review and meta-analysis. PLoS Med 17, e1003346 (2020).
[0896] Calain P, Roux L. The rule of six, a basic feature for efficient replication of Sendai virus defective interfering RNA. Journal of virology 67, 4822-4830 (1993).
[0897] Duprex W P, Collins F M, Rima B K. Modulating the function of the measles virus RNA-dependent RNA polymerase by insertion of green fluorescent protein into the open reading frame. Journal of virology 76, 7322-7328 (2002).
[0898] Kärber G. Beitrag zur kollektiven Behandlung pharmakologischer Reihenversuche. Archiv f experiment Pathol u Pharmakol 162, 480-483 (1931)

The application's sequence listing, which the Patent Office published only in electronic form, follows.

SEQUENCE LISTING (150 sequences)

SEQ ID NO: 1 - DNA, 3870 bp, Artificial sequence
  Native nucleotide sequence of the spike (S) polypeptide of nCoV
gctagcggatcccgtacggccaccatgtttgtttttcttgttttattgccactagtctctagtcagtgtgttaatcttacaaccagaactcaattaccccctgcatacactaattctttcacacgtggtgtttattaccctgacaaagttttcagatcctcagttttacattcaactcaggacttgttcttacctttcttttccaatgttacttggttccatgctatacatgtctctgggaccaatggtactaagaggtttgataaccctgtcctaccatttaatgatggtgtttattttgcttccactgagaagtctaacataataagaggctggatttttggtactactttagattcgaagacccagtccctacttattgttaataacgctactaatgttgttattaaagtctgtgaatttcaattttgtaatgatccatttttgggtgtttattaccacaaaaacaacaaaagttggatggaaagtgagttcagagtttattctagtgcgaataattgcacttttgaatatgtctctcagccttttcttatggaccttgaaggaaaacagggtaatttcaaaaatcttagggaatttgtgtttaagaatattgatggttattttaaaatatattctaagcacacgcctattaatttagtgcgtgatctccctcagggtttttcggctttagaaccattggtagatttgccaataggtattaacatcactaggtttcaaactttacttgctttacatagaagttatttgactcctggtgattcttcttcaggttggacagctggtgctgcagcttattatgtgggttatcttcaacctaggacttttctattaaaatataatgaaaatggaaccattacagatgctgtagactgtgcacttgaccctctctcagaaacaaagtgtacgttgaaatccttcactgtagaaaaaggaatctatcaaacttctaactttagagtccaaccaacagaatctattgttagatttcctaatattacaaacttgtgcccttttggtgaagtttttaacgccaccagatttgcatctgtttatgcttggaacaggaagagaatcagcaactgtgttgctgattattctgtcctatataattccgcatcattttccacttttaagtgttatggagtgtctcctactaaattaaatgatctctgctttactaatgtctatgcagattcatttgtaattagaggtgatgaagtcagacaaatcgctccagggcaaactggaaagattgctgattataattataaattaccagatgattttacaggctgcgttatagcttggaattctaacaatcttgattctaaggttggtggtaattataattacctgtatagattgtttaggaagtctaatctcaaaccttttgagagagatatttcaactgaaatctatcaggccggtagcacaccttgtaatggtgttgaaggttttaattgttactttcctttacaatcatatggtttccaacccactaatggtgttggttaccaaccatacagagtagtagtactttcttttgaacttctacatgcaccagcaactgtttgtggacctaaaaagtctactaatttggttaaaaacaaatgtgtcaatttcaacttcaatggtttaacaggcacaggtgttcttactgagtctaacaaaaagtttctgcctttccaacaatttggcagagacattgctgacactactgatgctgtccgtgatccacagacacttgagattcttgacattacaccatgttcttttggtggtgtcagtgttataacaccaggaacaaatacttctaaccaggttgctgttctttatcaggatgttaactgcacagaagtccctgttgctattcatgcagatcaacttactcctacttggcgtgtttattctacaggttctaatgtttttcaaacacgtgcaggctgtttaataggggctgaacatgtcaacaactcatatgagtgtgacatacccattggtgcaggtatatgcgctagttatcagactcagactaattctcctcggcgggcacgtagtgtagctagtcaatccatcattgcctacactatgtcacttggtgcagaaaattcagttgcttactctaataactctattgccatacccacaaattttactattagtgttaccacagaaattctaccagtgtctatgaccaagacatcagtagattgtacaatgtacatttgtggtgattcaactgaatgcagcaatcttttgttgcaatatggcagtttttgtacacaattaaaccgtgctttaactggaatagctgttgaacaagacaaaaacacccaagaagtttttgcacaagtcaaacaaatttacaaaacaccaccaattaaagattttggtggttttaatttttcacaaatattaccagatccatcaaaaccaagcaagaggtcatttattgaagatctacttttcaacaaagtgacacttgcagatgctggcttcatcaaacaatatggtgattgccttggtgatattgctgctagagacctcatttgtgcacaaaagtttaacggccttactgttttgccacctttgctcacagatgaaatgattgctcaatacacttctgcactgttagcgggtacaatcacttctggttggacctttggtgcaggtgctgcattacaaataccatttgctatgcaaatggcttataggtttaatggtattggagttacacagaatgttctctatgagaaccaaaaattgattgccaaccaatttaatagtgctattggcaaaattcaagactcactttcttccacagcaagtgcacttggaaaacttcaagatgtggtcaaccaaaatgcacaagctttaaacacgcttgttaaacaacttagctccaattttggtgcaatttcaagtgttttaaatgatatcctttcacgtcttgacaaagttgaggctgaagtgcaaattgataggttgatcacaggcagacttcaaagtttgcagacatatgtgactcaacaattaattagagctgcagaaatcagagcttctgctaatcttgctgctactaaaatgtcagagtgtgtacttggacaatcaaaaagagttgatttttgtggaaagggctatcatcttatgtccttccctcagtcagcacctcatggtgtagtcttcttgcatgtgacttatgtccctgcacaagaaaagaacttcacaactgctcctgccatttgtcatgatggaaaagcacactttcctcgtgaaggtgtctttgtttcaaatggcacacactggtttgtaacacaaaggaatttttatgaaccacaaatcattactacagacaacacatttgtgtctggtaactgtgatgttgtaataggaattgtcaacaacacagtttatgatcctttgcaacctgaattagactcattcaaggaggagttagataaatattttaagaatcatacatcaccagatgttgatttaggtgacatctctggcattaatgcttcagttgtaaacattcaaaaagaaattgaccgcctcaatgaggttgccaagaatttaaatgaatctctcatcgatctccaagaacttggaaagtatgagcagtatataaaatggccatggtacatttggctaggttttatagctggcttgattgccatagtaatggtgacaattatgctttgctgtatgaccagttgctgtagttgtctcaagggctgttgttcttgtggatcctgctgcaaatttgatgaagacgactctgagccagtgctcaaaggagtcaaattacattacacatgataacgagcgcgcctcgaggaattc

SEQ ID NO: 2 - DNA, 3870 bp, Artificial sequence
  Codon-optimized nucleotide sequence of the spike (S) polypeptide of nCoV
gctagcggatcccgtacggccaccatgttcgtgtttctggtgctgctgccactggtgtccagtcagtgcgtgaacctgaccacacgaacacagctgccaccagcctacaccaatagcttcacccgcggagtgtactaccccgacaaggtgttccgcagcagcgtgctgcatagcacccaggatctgtttctgcccttcttcagcaacgtgacctggttccacgccatccacgtgtccggcaccaatggcaccaagcgcttcgataatcccgtgctgcccttcaacgatggcgtgtactttgccagcaccgagaagtccaatatcatccgcggctggatcttcggcaccacactggatagcaagacccagagcctgctgatcgtgaacaacgccaccaacgtggtcatcaaagtgtgcgagttccagttctgcaacgaccccttcctgggcgtctactaccacaagaacaacaagagctggatggaaagcgagttccgcgtgtacagcagcgccaacaactgcaccttcgagtacgtgtcccagccattcctgatggacctggaaggcaagcagggcaacttcaagaacctgcgcgagttcgtgttcaagaacatcgacggctacttcaaaatctacagcaagcacaccccaatcaacctcgtgcgcgatctgccacagggattcagtgctctggaacccctggtggatctgcccatcggcatcaacattacccgctttcagacactgctggccctgcaccgcagttacttgacaccaggcgatagcagcagtggatggacagctggtgccgccgcttactacgttggatatctgcagccacgcacctttctgctgaagtacaacgagaacggcaccatcaccgacgccgtggattgtgctctcgatcccctgagcgagacaaagtgcaccctgaagtccttcaccgtcgagaagggcatctaccagaccagcaatttccgcgtgcagcccaccgagagcatcgtgcgcttccccaatatcaccaatctgtgccccttcggcgaggtgttcaatgccacacgctttgcctccgtgtacgcctggaatcgcaagcgcattagcaactgcgtggccgactactccgtgctgtacaatagcgccagcttcagcaccttcaagtgctacggcgtgtcacccaccaagctgaacgacctgtgcttcaccaatgtgtacgccgacagcttcgtgatccgcggagatgaagtgcgacagattgccccaggccagaccggcaagatcgccgactacaattacaagctgcccgacgacttcaccggctgcgtgatcgcctggaacagcaacaacctggattccaaagtcggcggcaactacaactacctgtaccgcctgttccgcaagagcaatctgaagcccttcgagcgcgacatcagcaccgaaatctaccaggccggaagcaccccatgcaacggcgtggaaggcttcaactgctacttcccactgcagtcctacggatttcagcccacaaatggcgtgggctaccagccatatcgagtggtggtgctgagcttcgaactgctgcatgctccagctaccgtgtgcggccccaagaagagtaccaacctggtcaagaacaaatgcgtgaacttcaacttcaacggcctgaccggaaccggcgtgctgaccgagagtaacaagaagttcctgccattccagcagtttggccgcgacattgccgatacaaccgatgccgttcgcgatccccagaccttggagatcctggatattaccccatgctccttcggcggcgtgtccgtgattacaccaggcaccaataccagcaaccaggtggccgttctgtaccaggatgtgaattgcacagaggtgcccgtggccattcacgccgatcaattgacaccaacatggcgcgtgtactccaccggcagcaatgtgtttcaaacccgcgctggatgcctgattggagccgagcacgtgaacaatagctacgagtgcgatatccccatcggagccggaatctgcgcctcctatcagacccagaccaatagtccacgacgagcccgaagtgtggccagccagagcatcattgcctataccatgagcctgggcgccgagaatagcgtggcctactccaacaacagcattgctatccccaccaacttcaccatcagcgtgaccaccgagatcctgccagtgtccatgaccaagaccagcgtggactgcaccatgtacatctgcggagatagcaccgagtgcagcaacctgctgctgcagtacggaagtttctgcacccagctgaatcgcgccctgacaggcattgccgtggaacaggataagaacacccaagaggtgttcgcccaagtgaagcaaatctacaagaccccaccaatcaaggatttcggcggcttcaatttcagccagattctgcccgatccaagcaagcccagcaagcgcagcttcatcgaggacctgctgttcaacaaagtgacactggccgacgccggattcatcaagcagtatggcgattgcctgggcgatattgccgcacgcgatctgatttgcgcccagaagtttaacggactgaccgtcctgccaccactgctgacagatgagatgatcgcccagtacacaagtgccctgctggccggaaccattaccagcggatggacatttggagccggtgccgctctgcagattcccttcgctatgcagatggcctaccgcttcaatggcattggcgtgacccagaatgtgctgtacgagaaccagaagctgatcgccaaccagttcaacagcgccatcggcaagattcaggacagcctgagtagtaccgccagcgctctgggaaagctgcaggatgtggtcaaccagaacgctcaggccctgaacaccctggttaagcagctgagcagcaacttcggcgccatcagtagcgtgctgaacgatatcctgagccgcctggataaggtggaagccgaggtgcagatcgatcgcctgattaccggacgcctgcagtccctgcagacctatgtgacacagcagctgatccgagccgccgagattcgagctagtgctaatctggccgccaccaagatgagcgaatgtgtgctgggacagagcaagcgcgtggacttttgcggcaagggataccacctgatgagcttcccacagagtgctccacacggcgtggtgtttctgcatgtgacctacgtgcccgctcaagagaagaatttcaccaccgctccagccatctgccacgacggaaaggcccattttccacgcgagggcgtgttcgttagcaacggcactcattggttcgtcacccagcgcaacttctacgagccccagatcatcaccaccgacaacaccttcgtcagcggcaactgcgacgtcgtgatcggcattgtgaacaacaccgtgtacgatccactgcagcccgagctggacagcttcaaagaggaactggacaagtactttaagaaccacacaagccccgacgtggacctgggagacattagcggaatcaacgccagcgtggtcaacatccagaaagagattgaccgcctgaacgaggtggccaagaatctgaacgagagcctgatcgacctgcaagaactgggcaaatacgagcagtacattaagtggccctggtacatctggctgggcttcattgccggactgattgccatcgtgatggtcaccattatgctgtgctgcatgaccagttgctgcagctgcctgaagggatgctgcagttgcggaagctgctgcaagttcgacgaggatgatagcgagccagtgctgaagggcgtcaagctgcactacacctgataacgagcgcgcctcgaggaattc

SEQ ID NO: 3 - protein, 1273 aa, Artificial sequence
  Spike (S) polypeptide of nCoV
MFVFLVLLPLVSSQCVNLTTRTQLPPAYTNSFTRGVYYPDKVFRSSVLHSTQDLFLPFFSNVTWFHAIHVSGTNGTKRFDNPVLPFNDGVYFASTEKSNIIRGWIFGTTLDSKTQSLLIVNNATNVVIKVCEFQFCNDPFLGVYYHKNNKSWMESEFRVYSSANNCTFEYVSQPFLMDLEGKQGNFKNLREFVFKNIDGYFKIYSKHTPINLVRDLPQGFSALEPLVDLPIGINITRFQTLLALHRSYLTPGDSSSGWTAGAAAYYVGYLQPRTFLLKYNENGTITDAVDCALDPLSETKCTLKSFTVEKGIYQTSNFRVQPTESIVRFPNITNLCPFGEVFNATRFASVYAWNRKRISNCVADYSVLYNSASFSTFKCYGVSPTKLNDLCFTNVYADSFVIRGDEVRQIAPGQTGKIADYNYKLPDDFTGCVIAWNSNNLDSKVGGNYNYLYRLFRKSNLKPFERDISTEIYQAGSTPCNGVEGFNCYFPLQSYGFQPTNGVGYQPYRVVVLSFELLHAPATVCGPKKSTNLVKNKCVNFNFNGLTGTGVLTESNKKFLPFQQFGRDIADTTDAVRDPQTLEILDITPCSFGGVSVITPGTNTSNQVAVLYQDVNCTEVPVAIHADQLTPTWRVYSTGSNVFQTRAGCLIGAEHVNNSYECDIPIGAGICASYQTQTNSPRRARSVASQSIIAYTMSLGAENSVAYSNNSIAIPTNFTISVTTEILPVSMTKTSVDCTMYICGDSTECSNLLLQYGSFCTQLNRALTGIAVEQDKNTQEVFAQVKQIYKTPPIKDFGGFNFSQILPDPSKPSKRSFIEDLLFNKVTLADAGFIKQYGDCLGDIAARDLICAQKFNGLTVLPPLLTDEMIAQYTSALLAGTITSGWTFGAGAALQIPFAMQMAYRFNGIGVTQNVLYENQKLIANQFNSAIGKIQDSLSSTASALGKLQDVVNQNAQALNTLVKQLSSNFGAISSVLNDILSRLDKVEAEVQIDRLITGRLQSLQTYVTQQLIRAAEIRASANLAATKMSECVLGQSKRVDFCGKGYHLMSFPQSAPHGVVFLHVTYVPAQEKNFTTAPAICHDGKAHFPREGVFVSNGTHWFVTQRNFYEPQIITTDNTFVSGNCDVVIGIVNNTVYDPLQPELDSFKEELDKYFKNHTSPDVDLGDISGINASVVNIQKEIDRLNEVAKNLNESLIDLQELGKYEQYIKWPWYIWLGFIAGLIAIVMVTIMLCCMTSCCSCLKGCCSCGSCCKFDEDDSEPVLKGVKLHYT

SEQ ID NO: 4 - DNA, 3870 bp, Artificial sequence
  Codon-optimized nucleotide sequence of a stabilized form of the spike (stab-S) polypeptide of nCoV
gctagcagatctcgtacggccaccatgttcgtgtttctggtgctgctgccactggtgtccagtcagtgcgtgaacctgaccacacgaacacagctgccaccagcctacaccaatagcttcacccgcggagtgtactaccccgacaaggtgttccgcagcagcgtgctgcatagcacccaggatctgtttctgcccttcttcagcaacgtgacctggttccacgccatccacgtgtccggcaccaatggcaccaagcgcttcgataatcccgtgctgcccttcaacgatggcgtgtactttgccagcaccgagaagtccaatatcatccgcggctggatcttcggcaccacactggatagcaagacccagagcctgctgatcgtgaacaacgccaccaacgtggtcatcaaagtgtgcgagttccagttctgcaacgaccccttcctgggcgtctactaccacaagaacaacaagagctggatggaaagcgagttccgcgtgtacagcagcgccaacaactgcaccttcgagtacgtgtcccagccattcctgatggacctggaaggcaagcagggcaacttcaagaacctgcgcgagttcgtgttcaagaacatcgacggctacttcaaaatctacagcaagcacaccccaatcaacctcgtgcgcgatctgccacagggattcagtgctctggaacccctggtggatctgcccatcggcatcaacattacccgctttcagacactgctggccctgcaccgcagttacttgacaccaggcgatagcagcagtggatggacagctggtgccgccgcttactacgttggatatctgcagccacgcacctttctgctgaagtacaacgagaacggcaccatcaccgacgccgtggattgtgctctcgatcccctgagcgagacaaagtgcaccctgaagtccttcaccgtcgagaagggcatctaccagaccagcaatttccgcgtgcagcccaccgagagcatcgtgcgcttccccaatatcaccaatctgtgccccttcggcgaggtgttcaatgccacacgctttgcctccgtgtacgcctggaatcgcaagcgcattagcaactgcgtggccgactactccgtgctgtacaatagcgccagcttcagcaccttcaagtgctacggcgtgtcacccaccaagctgaacgacctgtgcttcaccaatgtgtacgccgacagcttcgtgatccgcggagatgaagtgcgacagattgccccaggccagaccggcaagatcgccgactacaattacaagctgcccgacgacttcaccggctgcgtgatcgcctggaacagcaacaacctggattccaaagtcggcggcaactacaactacctgtaccgcctgttccgcaagagcaatctgaagcccttcgagcgcgacatcagcaccgaaatctaccaggccggaagcaccccatgcaacggcgtggaaggcttcaactgctacttcccactgcagtcctacggatttcagcccacaaatggcgtgggctaccagccatatcgagtggtggtgctgagcttcgaactgctgcatgctccagctaccgtgtgcggccccaagaagagtaccaacctggtcaagaacaaatgcgtgaacttcaacttcaacggcctgaccggaaccggcgtgctgaccgagagtaacaagaagttcctgccattccagcagtttggccgcgacattgccgatacaaccgatgccgttcgcgatccccagaccttggagatcctggatattaccccatgctccttcggcggcgtgtccgtgattacaccaggcaccaataccagcaaccaggtggccgttctgtaccaggatgtgaattgcacagaggtgcccgtggccattcacgccgatcaattgacaccaacatggcgcgtgtactccaccggcagcaatgtgtttcaaacccgcgctggatgcctgattggagccgagcacgtgaacaatagctacgagtgcgatatccccatcggagccggaatctgcgcctcctatcagacccagaccaatagtccacgacgagcccgaagtgtggccagccagagcatcattgcctataccatgagcctgggcgccgagaatagcgtggcctactccaacaacagcattgctatccccaccaacttcaccatcagcgtgaccaccgagatcctgccagtgtccatgaccaagaccagcgtggactgcaccatgtacatctgcggagatagcaccgagtgcagcaacctgctgctgcagtacggaagtttctgcacccagctgaatcgcgccctgacaggcattgccgtggaacaggataagaacacccaagaggtgttcgcccaagtgaagcaaatctacaagaccccaccaatcaaggatttcggcggcttcaatttcagccagattctgcccgatccaagcaagcccagcaagcgcagcttcatcgaggacctgctgttcaacaaagtgacactggccgacgccggattcatcaagcagtatggcgattgcctgggcgatattgccgcacgcgatctgatttgcgcccagaagtttaacggactgaccgtcctgccaccactgctgacagatgagatgatcgcccagtacacaagtgccctgctggccggaaccattaccagcggatggacatttggagccggtgccgctctgcagattcccttcgctatgcagatggcctaccgcttcaatggcattggcgtgacccagaatgtgctgtacgagaaccagaagctgatcgccaaccagttcaacagcgccatcggcaagattcaggacagcctgagtagtaccgccagcgctctgggaaagctgcaggatgtggtcaaccagaacgctcaggccctgaacaccctggttaagcagctgagcagcaacttcggcgccatcagtagcgtgctgaacgatatcctgagccgcctggatccaccagaagccgaggtgcagatcgatcgcctgattaccggacgcctgcagtccctgcagacctatgtgacacagcagctgatccgagccgccgagattcgagctagtgctaatctggccgccaccaagatgagcgaatgtgtgctgggacagagcaagcgcgtggacttttgcggcaagggataccacctgatgagcttcccacagagtgctccacacggcgtggtgtttctgcatgtgacctacgtgcccgctcaagagaagaatttcaccaccgctccagccatctgccacgacggaaaggcccattttccacgcgagggcgtgttcgttagcaacggcactcattggttcgtcacccagcgcaacttctacgagccccagatcatcaccaccgacaacaccttcgtcagcggcaactgcgacgtcgtgatcggcattgtgaacaacaccgtgtacgatccactgcagcccgagctggacagcttcaaagaggaactggacaagtactttaagaaccacacaagccccgacgtggacctgggagacattagcggaatcaacgccagcgtggtcaacatccagaaagagattgaccgcctgaacgaggtggccaagaatctgaacgagagcctgatcgacctgcaagaactgggcaaatacgagcagtacattaagtggccctggtacatctggctgggcttcattgccggactgattgccatcgtgatggtcaccattatgctgtgctgcatgaccagttgctgcagctgcctgaagggatgctgcagttgcggaagctgctgcaagttcgacgaggatgatagcgagccagtgctgaagggcgtcaagctgcactacacctgataacgagcgcgcctcgaggaattc

SEQ ID NO: 5 - protein, 1273 aa, Artificial sequence
  Stabilized form of the spike (stab-S) polypeptide of nCoV
MFVFLVLLPLVSSQCVNLTTRTQLPPAYTNSFTRGVYYPDKVFRSSVLHSTQDLFLPFFSNVTWFHAIHVSGTNGTKRFDNPVLPFNDGVYFASTEKSNIIRGWIFGTTLDSKTQSLLIVNNATNVVIKVCEFQFCNDPFLGVYYHKNNKSWMESEFRVYSSANNCTFEYVSQPFLMDLEGKQGNFKNLREFVFKNIDGYFKIYSKHTPINLVRDLPQGFSALEPLVDLPIGINITRFQTLLALHRSYLTPGDSSSGWTAGAAAYYVGYLQPRTFLLKYNENGTITDAVDCALDPLSETKCTLKSFTVEKGIYQTSNFRVQPTESIVRFPNITNLCPFGEVFNATRFASVYAWNRKRISNCVADYSVLYNSASFSTFKCYGVSPTKLNDLCFTNVYADSFVIRGDEVRQIAPGQTGKIADYNYKLPDDFTGCVIAWNSNNLDSKVGGNYNYLYRLFRKSNLKPFERDISTEIYQAGSTPCNGVEGFNCYFPLQSYGFQPTNGVGYQPYRVVVLSFELLHAPATVCGPKKSTNLVKNKCVNFNFNGLTGTGVLTESNKKFLPFQQFGRDIADTTDAVRDPQTLEILDITPCSFGGVSVITPGTNTSNQVAVLYQDVNCTEVPVAIHADQLTPTWRVYSTGSNVFQTRAGCLIGAEHVNNSYECDIPIGAGICASYQTQTNSPRRARSVASQSIIAYTMSLGAENSVAYSNNSIAIPTNFTISVTTEILPVSMTKTSVDCTMYICGDSTECSNLLLQYGSFCTQLNRALTGIAVEQDKNTQEVFAQVKQIYKTPPIKDFGGFNFSQILPDPSKPSKRSFIEDLLFNKVTLADAGFIKQYGDCLGDIAARDLICAQKFNGLTVLPPLLTDEMIAQYTSALLAGTITSGWTFGAGAALQIPFAMQMAYRFNGIGVTQNVLYENQKLIANQFNSAIGKIQDSLSSTASALGKLQDVVNQNAQALNTLVKQLSSNFGAISSVLNDILSRLDPPEAEVQIDRLITGRLQSLQTYVTQQLIRAAEIRASANLAATKMSECVLGQSKRVDFCGKGYHLMSFPQSAPHGVVFLHVTYVPAQEKNFTTAPAICHDGKAHFPREGVFVSNGTHWFVTQRNFYEPQIITTDNTFVSGNCDVVIGIVNNTVYDPLQPELDSFKEELDKYFKNHTSPDVDLGDISGINASVVNIQKEIDRLNEVAKNLNESLIDLQELGKYEQYIKWPWYIWLGFIAGLIAIVMVTIMLCCMTSCCSCLKGCCSCGSCCKFDEDDSEPVLKGVKLHYT

SEQ ID NO: 6 - DNA, 3680 bp, Artificial sequence
  Codon-optimized nucleotide sequence of the soluble and monomeric form of the spike (Secto) ectodomain polypeptide of nCoV
actagctagcggatcccgtacggccaccatgttcgtgtttctggtgctgctgccactggtgtccagtcagtgcgtgaacctgaccacacgaacacagctgccaccagcctacaccaatagcttcacccgcggagtgtactaccccgacaaggtgttccgcagcagcgtgctgcatagcacccaggatctgtttctgcccttcttcagcaacgtgacctggttccacgccatccacgtgtccggcaccaatggcaccaagcgcttcgataatcccgtgctgcccttcaacgatggcgtgtactttgccagcaccgagaagtccaatatcatccgcggctggatcttcggcaccacactggatagcaagacccagagcctgctgatcgtgaacaacgccaccaacgtggtcatcaaagtgtgcgagttccagttctgcaacgaccccttcctgggcgtctactaccacaagaacaacaagagctggatggaaagcgagttccgcgtgtacagcagcgccaacaactgcaccttcgagtacgtgtcccagccattcctgatggacctggaaggcaagcagggcaacttcaagaacctgcgcgagttcgtgttcaagaacatcgacggctacttcaaaatctacagcaagcacaccccaatcaacctcgtgcgcgatctgccacagggattcagtgctctggaacccctggtggatctgcccatcggcatcaacattacccgctttcagacactgctggccctgcaccgcagttacttgacaccaggcgatagcagcagtggatggacagctggtgccgccgcttactacgttggatatctgcagccacgcacctttctgctgaagtacaacgagaacggcaccatcaccgacgccgtggattgtgctctcgatcccctgagcgagacaaagtgcaccctgaagtccttcaccgtcgagaagggcatctaccagaccagcaatttccgcgtgcagcccaccgagagcatcgtgcgcttccccaatatcaccaatctgtgccccttcggcgaggtgttcaatgccacacgctttgcctccgtgtacgcctggaatcgcaagcgcattagcaactgcgtggccgactactccgtgctgtacaatagcgccagcttcagcaccttcaagtgctacggcgtgtcacccaccaagctgaacgacctgtgcttcaccaatgtgtacgccgacagcttcgtgatccgcggagatgaagtgcgacagattgccccaggccagaccggcaagatcgccgactacaattacaagctgcccgacgacttcaccggctgcgtgatcgcctggaacagcaacaacctggattccaaagtcggcggcaactacaactacctgtaccgcctgttccgcaagagcaatctgaagcccttcgagcgcgacatcagcaccgaaatctaccaggccggaagcaccccatgcaacggcgtggaaggcttcaactgctacttcccactgcagtcctacggatttcagcccacaaatggcgtgggctaccagccatatcgagtggtggtgctgagcttcgaactgctgcatgctccagctaccgtgtgcggccccaagaagagtaccaacctggtcaagaacaaatgcgtgaacttcaacttcaacggcctgaccggaaccggcgtgctgaccgagagtaacaagaagttcctgccattccagcagtttggccgcgacattgccgatacaaccgatgccgttcgcgatccccagaccttggagatcctggatattaccccatgctccttcggcggcgtgtccgtgattacaccaggcaccaataccagcaaccaggtggccgttctgtaccaggatgtgaattgcacagaggtgcccgtggccattcacgccgatcaattgacaccaacatggcgcgtgtactccaccggcagcaatgtgtttcaaacccgcgctggatgcctgattggagccgagcacgtgaacaatagctacgagtgcgatatccccatcggagccggaatctgcgcctcctatcagacccagaccaatagtccacgacgagcccgaagtgtggccagccagagcatcattgcctataccatgagcctgggcgccgagaatagcgtggcctactccaacaacagcattgctatccccaccaacttcaccatcagcgtgaccaccgagatcctgccagtgtccatgaccaagaccagcgtggactgcaccatgtacatctgcggagatagcaccgagtgcagcaacctgctgctgcagtacggaagtttctgcacccagctgaatcgcgccctgacaggcattgccgtggaacaggataagaacacccaagaggtgttcgcccaagtgaagcaaatctacaagaccccaccaatcaaggatttcggcggcttcaatttcagccagattctgcccgatccaagcaagcccagcaagcgcagcttcatcgaggacctgctgttcaacaaagtgacactggccgacgccggattcatcaagcagtatggcgattgcctgggcgatattgccgcacgcgatctgatttgcgcccagaagtttaacggactgaccgtcctgccaccactgctgacagatgagatgatcgcccagtacacaagtgccctgctggccggaaccattaccagcggatggacatttggagccggtgccgctctgcagattcccttcgctatgcagatggcctaccgcttcaatggcattggcgtgacccagaatgtgctgtacgagaaccagaagctgatcgccaaccagttcaacagcgccatcggcaagattcaggacagcctgagtagtaccgccagcgctctgggaaagctgcaggatgtggtcaaccagaacgctcaggccctgaacaccctggttaagcagctgagcagcaacttcggcgccatcagtagcgtgctgaacgatatcctgagccgcctggataaggtggaagccgaggtgcagatcgatcgcctgattaccggacgcctgcagtccctgcagacctatgtgacacagcagctgatccgagccgccgagattcgagctagtgctaatctggccgccaccaagatgagcgaatgtgtgctgggacagagcaagcgcgtggacttttgcggcaagggataccacctgatgagcttcccacagagtgctccacacggcgtggtgtttctgcatgtgacctacgtgcccgctcaagagaagaatttcaccaccgctccagccatctgccacgacggaaaggcccattttccacgcgagggcgtgttcgttagcaacggcactcattggttcgtcacccagcgcaacttctacgagccccagatcatcaccaccgacaacaccttcgtcagcggcaactgcgacgtcgtgatcggcattgtgaacaacaccgtgtacgatccactgcagcccgagctggacagcttcaaagaggaactggacaagtactttaagaaccacacaagccccgacgtggacctgggagacattagcggaatcaacgccagcgtggtcaacatccagaaagagattgaccgcctgaacgaggtggccaagaatctgaacgagagcctgatcgacctgcaagaactgggcaaatacgagcagtacattaagtgataacgagcgcgctact

SEQ ID NO: 7 - protein, 1211 aa, Artificial sequence
  Soluble and monomeric form of the spike (Secto) ectodomain polypeptide of nCoV
MFVFLVLLPLVSSQCVNLTTRTQLPPAYTNSFTRGVYYPDKVFRSSVLHSTQDLFLPFFSNVTWFHAIHVSGTNGTKRFDNPVLPFNDGVYFASTEKSNIIRGWIFGTTLDSKTQSLLIVNNATNVVIKVCEFQFCNDPFLGVYYHKNNKSWMESEFRVYSSANNCTFEYVSQPFLMDLEGKQGNFKNLREFVFKNIDGYFKIYSKHTPINLVRDLPQGFSALEPLVDLPIGINITRFQTLLALHRSYLTPGDSSSGWTAGAAAYYVGYLQPRTFLLKYNENGTITDAVDCALDPLSETKCTLKSFTVEKGIYQTSNFRVQPTESIVRFPNITNLCPFGEVFNATRFASVYAWNRKRISNCVADYSVLYNSASFSTFKCYGVSPTKLNDLCFTNVYADSFVIRGDEVRQIAPGQTGKIADYNYKLPDDFTGCVIAWNSNNLDSKVGGNYNYLYRLFRKSNLKPFERDISTEIYQAGSTPCNGVEGFNCYFPLQSYGFQPTNGVGYQPYRVVVLSFELLHAPATVCGPKKSTNLVKNKCVNFNFNGLTGTGVLTESNKKFLPFQQFGRDIADTTDAVRDPQTLEILDITPCSFGGVSVITPGTNTSNQVAVLYQDVNCTEVPVAIHADQLTPTWRVYSTGSNVFQTRAGCLIGAEHVNNSYECDIPIGAGICASYQTQTNSPRRARSVASQSIIAYTMSLGAENSVAYSNNSIAIPTNFTISVTTEILPVSMTKTSVDCTMYICGDSTECSNLLLQYGSFCTQLNRALTGIAVEQDKNTQEVFAQVKQIYKTPPIKDFGGFNFSQILPDPSKPSKRSFIEDLLFNKVTLADAGFIKQYGDCLGDIAARDLICAQKFNGLTVLPPLLTDEMIAQYTSALLAGTITSGWTFGAGAALQIPFAMQMAYRFNGIGVTQNVLYENQKLIANQFNSAIGKIQDSLSSTASALGKLQDVVNQNAQALNTLVKQLSSNFGAISSVLNDILSRLDKVEAEVQIDRLITGRLQSLQTYVTQQLIRAAEIRASANLAATKMSECVLGQSKRVDFCGKGYHLMSFPQSAPHGVVFLHVTYVPAQEKNFTTAPAICHDGKAHFPREGVFVSNGTHWFVTQRNFYEPQIITTDNTFVSGNCDVVIGIVNNTVYDPLQPELDSFKEELDKYFKNHTSPDVDLGDISGINASVVNIQKEIDRLNEVAKNLNESLIDLQELGKYEQYIK

SEQ ID NO: 8 - DNA, 3680 bp, Artificial sequence
  Codon-optimized nucleotide sequence of the stabilized form of the spike (stab-Secto) ectodomain polypeptide of nCoV
actagctagcagatctcgtacggccaccatgttcgtgtttctggtgctgctgccactggtgtccagtcagtgcgtgaacctgaccacacgaacacagctgccaccagcctacaccaatagcttcacccgcggagtgtactaccccgacaaggtgttccgcagcagcgtgctgcatagcacccaggatctgtttctgcccttcttcagcaacgtgacctggttccacgccatccacgtgtccggcaccaatggcaccaagcgcttcgataatcccgtgctgcccttcaacgatggcgtgtactttgccagcaccgagaagtccaatatcatccgcggctggatcttcggcaccacactggatagcaagacccagagcctgctgatcgtgaacaacgccaccaacgtggtcatcaaagtgtgcgagttccagttctgcaacgaccccttcctgggcgtctactaccacaagaacaacaagagctggatggaaagcgagttccgcgtgtacagcagcgccaacaactgcaccttcgagtacgtgtcccagccattcctgatggacctggaaggcaagcagggcaacttcaagaacctgcgcgagttcgtgttcaagaacatcgacggctacttcaaaatctacagcaagcacaccccaatcaacctcgtgcgcgatctgccacagggattcagtgctctggaacccctggtggatctgcccatcggcatcaacattacccgctttcagacactgctggccctgcaccgcagttacttgacaccaggcgatagcagcagtggatggacagctggtgccgccgcttactacgttggatatctgcagccacgcacctttctgctgaagtacaacgagaacggcaccatcaccgacgccgtggattgtgctctcgatcccctgagcgagacaaagtgcaccctgaagtccttcaccgtcgagaagggcatctaccagaccagcaatttccgcgtgcagcccaccgagagcatcgtgcgcttccccaatatcaccaatctgtgccccttcggcgaggtgttcaatgccacacgctttgcctccgtgtacgcctggaatcgcaagcgcattagcaactgcgtggccgactactccgtgctgtacaatagcgccagcttcagcaccttcaagtgctacggcgtgtcacccaccaagctgaacgacctgtgcttcaccaatgtgtacgccgacagcttcgtgatccgcggagatgaagtgcgacagattgccccaggccagaccggcaagatcgccgactacaattacaagctgcccgacgacttcaccggctgcgtgatcgcctggaacagcaacaacctggattccaaagtcggcggcaactacaactacctgtaccgcctgttccgcaagagcaatctgaagcccttcgagcgcgacatcagcaccgaaatctaccaggccggaagcaccccatgcaacggcgtggaaggcttcaactgctacttcccactgcagtcctacggatttcagcccacaaatggcgtgggctaccagccatatcgagtggtggtgctgagcttcgaactgctgcatgctccagctaccgtgtgcggccccaagaagagtaccaacctggtcaagaacaaatgcgtgaacttcaacttcaacggcctgaccggaaccggcgtgctgaccgagagtaacaagaagttcctgccattccagcagtttggccgcgacattgccgatacaaccgatgccgttcgcgatccccagaccttggagatcctggatattaccccatgctccttcggcggcgtgtccgtgattacaccaggcaccaataccagcaaccaggtggccgttctgtaccaggatgtgaattgcacagaggtgcccgtggccattcacgccgatcaattgacaccaacatggcgcgtgtactccaccggcagcaatgtgtttcaaacccgcgctggatgcctgattggagccgagcacgtgaacaatagctacgagtgcgatatccccatcggagccggaatctgcgcctcctatcagacccagaccaatagtccacgacgagcccgaagtgtggccagccagagcatcattgcctataccatgagcctgggcgccgagaatagcgtggcctactccaacaacagcattgctatccccaccaacttcaccatcagcgtgaccaccgagatcctgccagtgtccatgaccaagaccagcgtggactgcaccatgtacatctgcggagatagcaccgagtgcagcaacctgctgctgcagtacggaagtttctgcacccagctgaatcgcgccctgacaggcattgccgtggaacaggataagaacacccaagaggtgttcgcccaagtgaagcaaatctacaagaccccaccaatcaaggatttcggcggcttcaatttcagccagattctgcccgatccaagcaagcccagcaagcgcagcttcatcgaggacctgctgttcaacaaagtgacactggccgacgccggattcatcaagcagtatggcgattgcctgggcgatattgccgcacgcgatctgatttgcgcccagaagtttaacggactgaccgtcctgccaccactgctgacagatgagatgatcgcccagtacacaagtgccctgctggccggaaccattaccagcggatggacatttggagccggtgccgctctgcagattcccttcgctatgcagatggcctaccgcttcaatggcattggcgtgacccagaatgtgctgtacgagaaccagaagctgatcgccaaccagttcaacagcgccatcggcaagattcaggacagcctgagtagtaccgccagcgctctgggaaagctgcaggatgtggtcaaccagaacgctcaggccctgaacaccctggttaagcagctgagcagcaacttcggcgccatcagtagcgtgctgaacgatatcctgagccgcctggatccaccagaagccgaggtgcagatcgatcgcctgattaccggacgcctgcagtccctgcagacctatgtgacacagcagctgatccgagccgccgagattcgagctagtgctaatctggccgccaccaagatgagcgaatgtgtgctgggacagagcaagcgcgtggacttttgcggcaagggataccacctgatgagcttcccacagagtgctccacacggcgtggtgtttctgcatgtgacctacgtgcccgctcaagagaagaatttcaccaccgctccagccatctgccacgacggaaaggcccattttccacgcgagggcgtgttcgttagcaacggcactcattggttcgtcacccagcgcaacttctacgagccccagatcatcaccaccgacaacaccttcgtcagcggcaactgcgacgtcgtgatcggcattgtgaacaacaccgtgtacgatccactgcagcccgagctggacagcttcaaagaggaactggacaagtactttaagaaccacacaagccccgacgtggacctgggagacattagcggaatcaacgccagcgtggtcaacatccagaaagagattgaccgcctgaacgaggtggccaagaatctgaacgagagcctgatcgacctgcaagaactgggcaaatacgagcagtacattaagtgataacgagcgcgctact

SEQ ID NO: 9 - protein, 1211 aa, Artificial sequence
  Stabilized form of the spike (stab-Secto) ectodomain polypeptide of nCoV
MFVFLVLLPLVSSQCVNLTTRTQLPPAYTNSFTRGVYYPDKVFRSSVLHSTQDLFLPFFSNVTWFHAIHVSGTNGTKRFDNPVLPFNDGVYFASTEKSNIIRGWIFGTTLDSKTQSLLIVNNATNVVIKVCEFQFCNDPFLGVYYHKNNKSWMESEFRVYSSANNCTFEYVSQPFLMDLEGKQGNFKNLREFVFKNIDGYFKIYSKHTPINLVRDLPQGFSALEPLVDLPIGINITRFQTLLALHRSYLTPGDSSSGWTAGAAAYYVGYLQPRTFLLKYNENGTITDAVDCALDPLSETKCTLKSFTVEKGIYQTSNFRVQPTESIVRFPNITNLCPFGEVFNATRFASVYAWNRKRISNCVADYSVLYNSASFSTFKCYGVSPTKLNDLCFTNVYADSFVIRGDEVRQIAPGQTGKIADYNYKLPDDFTGCVIAWNSNNLDSKVGGNYNYLYRLFRKSNLKPFERDISTEIYQAGSTPCNGVEGFNCYFPLQSYGFQPTNGVGYQPYRVVVLSFELLHAPATVCGPKKSTNLVKNKCVNFNFNGLTGTGVLTESNKKFLPFQQFGRDIADTTDAVRDPQTLEILDITPCSFGGVSVITPGTNTSNQVAVLYQDVNCTEVPVAIHADQLTPTWRVYSTGSNVFQTRAGCLIGAEHVNNSYECDIPIGAGICASYQTQTNSPRRARSVASQSIIAYTMSLGAENSVAYSNNSIAIPTNFTISVTTEILPVSMTKTSVDCTMYICGDSTECSNLLLQYGSFCTQLNRALTGIAVEQDKNTQEVFAQVKQIYKTPPIKDFGGFNFSQILPDPSKPSKRSFIEDLLFNKVTLADAGFIKQYGDCLGDIAARDLICAQKFNGLTVLPPLLTDEMIAQYTSALLAGTITSGWTFGAGAALQIPFAMQMAYRFNGIGVTQNVLYENQKLIANQFNSAIGKIQDSLSSTASALGKLQDVVNQNAQALNTLVKQLSSNFGAISSVLNDILSRLDPPEAEVQIDRLITGRLQSLQTYVTQQLIRAAEIRASANLAATKMSECVLGQSKRVDFCGKGYHLMSFPQSAPHGVVFLHVTYVPAQEKNFTTAPAICHDGKAHFPREGVFVSNGTHWFVTQRNFYEPQIITTDNTFVSGNCDVVIGIVNNTVYDPLQPELDSFKEELDKYFKNHTSPDVDLGDISGINASVVNIQKEIDRLNEVAKNLNESLIDLQELGKYEQYIK

SEQ ID NO: 10 - DNA, 2090 bp, Artificial sequence
  Codon-optimized nucleotide sequence of the S1 polypeptide of nCoV
actagctagcggatcccgtacggccaccatgttcgtgtttctggtgctgctgccactggtgtccagtcagtgcgtgaacctgaccacacgaacacagctgccaccagcctacaccaatagcttcacccgcggagtgtactaccccgacaaggtgttccgcagcagcgtgctgcatagcacccaggatctgtttctgcccttcttcagcaacgtgacctggttccacgccatccacgtgtccggcaccaatggcaccaagcgcttcgataatcccgtgctgcccttcaacgatggcgtgtactttgccagcaccgagaagtccaatatcatccgcggctggatcttcggcaccacactggatagcaagacccagagcctgctgatcgtgaacaacgccaccaacgtggtcatcaaagtgtgcgagttccagttctgcaacgaccccttcctgggcgtctactaccacaagaacaacaagagctggatggaaagcgagttccgcgtgtacagcagcgccaacaactgcaccttcgagtacgtgtcccagccattcctgatggacctggaaggcaagcagggcaacttcaagaacctgcgcgagttcgtgttcaagaacatcgacggctacttcaaaatctacagcaagcacaccccaatcaacctcgtgcgcgatctgccacagggattcagtgctctggaacccctggtggatctgcccatcggcatcaacattacccgctttcagacactgctggccctgcaccgcagttacttgacaccaggcgatagcagcagtggatggacagctggtgccgccgcttactacgttggatatctgcagccacgcacctttctgctgaagtacaacgagaacggcaccatcaccgacgccgtggattgtgctctcgatcccctgagcgagacaaagtgcaccctgaagtccttcaccgtcgagaagggcatctaccagaccagcaatttccgcgtgcagcccaccgagagcatcgtgcgcttccccaatatcaccaatctgtgccccttcggcgaggtgttcaatgccacacgctttgcctccgtgtacgcctggaatcgcaagcgcattagcaactgcgtggccgactactccgtgctgtacaatagcgccagcttcagcaccttcaagtgctacggcgtgtcacccaccaagctgaacgacctgtgcttcaccaatgtgtacgccgacagcttcgtgatccgcggagatgaagtgcgacagattgccccaggccagaccggcaagatcgccgactacaattacaagctgcccgacgacttcaccggctgcgtgatcgcctggaacagcaacaacctggattccaaagtcggcggcaactacaactacctgtaccgcctgttccgcaagagcaatctgaagcccttcgagcgcgacatcagcaccgaaatctaccaggccggaagcaccccatgcaacggcgtggaaggcttcaactgctacttcccactgcagtcctacggatttcagcccacaaatggcgtgggctaccagccatatcgagtggtggtgctgagcttcgaactgctgcatgctccagctaccgtgtgcggccccaagaagagtaccaacctggtcaagaacaaatgcgtgaacttcaacttcaacggcctgaccggaaccggcgtgctgaccgagagtaacaagaagttcctgccattccagcagtttggccgcgacattgccgatacaaccgatgccgttcgcgatccccagaccttggagatcctggatattaccccatgctccttcggcggcgtgtccgtgattacaccaggcaccaataccagcaaccaggtggccgttctgtaccaggatgtgaattgcacagaggtgcccgtggccattcacgccgatcaattgacaccaacatggcgcgtgtactccaccggcagcaatgtgtttcaaacccgcgctggatgcctgattggagccgagcacgtgaacaatagctacgagtgcgatatccccatcggagccggaatctgcgcctcctatcagacccagaccaatagtccatgataacgagcgcgctact

SEQ ID NO: 11 - protein, 681 aa, Artificial sequence
  S1 polypeptide of nCoV
MFVFLVLLPLVSSQCVNLTTRTQLPPAYTNSFTRGVYYPDKVFRSSVLHSTQDLFLPFFSNVTWFHAIHVSGTNGTKRFDNPVLPFNDGVYFASTEKSNIIRGWIFGTTLDSKTQSLLIVNNATNVVIKVCEFQFCNDPFLGVYYHKNNKSWMESEFRVYSSANNCTFEYVSQPFLMDLEGKQGNFKNLREFVFKNIDGYFKIYSKHTPINLVRDLPQGFSALEPLVDLPIGINITRFQTLLALHRSYLTPGDSSSGWTAGAAAYYVGYLQPRTFLLKYNENGTITDAVDCALDPLSETKCTLKSFTVEKGIYQTSNFRVQPTESIVRFPNITNLCPFGEVFNATRFASVYAWNRKRISNCVADYSVLYNSASFSTFKCYGVSPTKLNDLCFTNVYADSFVIRGDEVRQIAPGQTGKIADYNYKLPDDFTGCVIAWNSNNLDSKVGGNYNYLYRLFRKSNLKPFERDISTEIYQAGSTPCNGVEGFNCYFPLQSYGFQPTNGVGYQPYRVVVLSFELLHAPATVCGPKKSTNLVKNKCVNFNFNGLTGTGVLTESNKKFLPFQQFGRDIADTTDAVRDPQTLEILDITPCSFGGVSVITPGTNTSNQVAVLYQDVNCTEVPVAIHADQLTPTWRVYSTGSNVFQTRAGCLIGAEHVNNSYECDIPIGAGICASYQTQTNSP

SEQ ID NO: 12 - DNA, 1860 bp, Artificial sequence
  Codon-optimized nucleotide sequence of the S2 polypeptide of nCoV
gctagcggatcccgtacggccaccatgttcgtgtttctggtgctgctgccactggtgtccagtcaggccggcagtgtggccagccagagcatcattgcctataccatgagcctgggcgccgagaatagcgtggcctactccaacaacagcattgctatccccaccaacttcaccatcagcgtgaccaccgagatcctgccagtgtccatgaccaagaccagcgtggactgcaccatgtacatctgcggagatagcaccgagtgcagcaacctgctgctgcagtacggaagtttctgcacccagctgaatcgcgccctgacaggcattgccgtggaacaggataagaacacccaagaggtgttcgcccaagtgaagcaaatctacaagaccccaccaatcaaggatttcggcggcttcaatttcagccagattctgcccgatccaagcaagcccagcaagcgcagcttcatcgaggacctgctgttcaacaaagtgacactggccgacgccggattcatcaagcagtatggcgattgcctgggcgatattgccgcacgcgatctgatttgcgcccagaagtttaacggactgaccgtcctgccaccactgctgacagatgagatgatcgcccagtacacaagtgccctgctggccggaaccattaccagcggatggacatttggagccggtgccgctctgcagattcccttcgctatgcagatggcctaccgcttcaatggcattggcgtgacccagaatgtgctgtacgagaaccagaagctgatcgccaaccagttcaacagcgccatcggcaagattcaggacagcctgagtagtaccgccagcgctctgggaaagctgcaggatgtggtcaaccagaacgctcaggccctgaacaccctggttaagcagctgagcagcaacttcggcgccatcagtagcgtgctgaacgatatcctgagccgcctggataaggtggaagccgaggtgcagatcgatcgcctgattaccggacgcctgcagtccctgcagacctatgtgacacagcagctgatccgagccgccgagattcgagctagtgctaatctggccgccaccaagatgagcgaatgtgtgctgggacagagcaagcgcgtggacttttgcggcaagggataccacctgatgagcttcccacagagtgctccacacggcgtggtgtttctgcatgtgacctacgtgcccgctcaagagaagaatttcaccaccgctccagccatctgccacgacggaaaggcccattttccacgcgagggcgtgttcgttagcaacggcactcattggttcgtcacccagcgcaacttctacgagccccagatcatcaccaccgacaacaccttcgtcagcggcaactgcgacgtcgtgatcggcattgtgaacaacaccgtgtacgatccactgcagcccgagctggacagcttcaaagaggaactggacaagtactttaagaaccacacaagccccgacgtggacctgggagacattagcggaatcaacgccagcgtggtcaacatccagaaagagattgaccgcctgaacgaggtggccaagaatctgaacgagagcctgatcgacctgcaagaactgggcaaatacgagcagtacattaagtggccctggtacatctggctgggcttcattgccggactgattgccatcgtgatggtcaccattatgctgtgctgcatgaccagttgctgcagctgcctgaagggatgctgcagttgcggaagctgctgcaagttcgacgaggatgatagcgagccagtgctgaagggcgtcaagctgcactacacctgataagcgcgcctcgaggaattc

SEQ ID NO: 13 - protein, 604 aa, Artificial sequence
  S2 polypeptide of nCoV
MFVFLVLLPLVSSQAGSVASQSIIAYTMSLGAENSVAYSNNSIAIPTNFTISVTTEILPVSMTKTSVDCTMYICGDSTECSNLLLQYGSFCTQLNRALTGIAVEQDKNTQEVFAQVKQIYKTPPIKDFGGFNFSQILPDPSKPSKRSFIEDLLFNKVTLADAGFIKQYGDCLGDIAARDLICAQKFNGLTVLPPLLTDEMIAQYTSALLAGTITSGWTFGAGAALQIPFAMQMAYRFNGIGVTQNVLYENQKLIANQFNSAIGKIQDSLSSTASALGKLQDVVNQNAQALNTLVKQLSSNFGAISSVLNDILSRLDKVEAEVQIDRLITGRLQSLQTYVTQQLIRAAEIRASANLAATKMSECVLGQSKRVDFCGKGYHLMSFPQSAPHGVVFLHVTYVPAQEKNFTTAPAICHDGKAHFPREGVFVSNGTHWFVTQRNFYEPQIITTDNTFVSGNCDVVIGIVNNTVYDPLQPELDSFKEELDKYFKNHTSPDVDLGDISGINASVVNIQKEIDRLNEVAKNLNESLIDLQELGKYEQYIKWPWYIWLGFIAGLIAIVMVTIMLCCMTSCCSCLKGCCSCGSCCKFDEDDSEPVLKGVKLHYT

SEQ ID NO: 14 - DNA, 1860 bp, Artificial sequence
  Codon-optimized nucleotide sequence of the stabilized form of the S2 (stab-S2) polypeptide of nCoV
gctagcagatctcgtacggccaccatgttcgtgtttctggtgctgctgccactggtgtccagtcaggccggcagtgtggccagccagagcatcattgcctataccatgagcctgggcgccgagaatagcgtggcctactccaacaacagcattgctatccccaccaacttcaccatcagcgtgaccaccgagatcctgccagtgtccatgaccaagaccagcgtggactgcaccatgtacatctgcggagatagcaccgagtgcagcaacctgctgctgcagtacggaagtttctgcacccagctgaatcgcgccctgacaggcattgccgtggaacaggataagaacacccaagaggtgttcgcccaagtgaagcaaatctacaagaccccaccaatcaaggatttcggcggcttcaatttcagccagattctgcccgatccaagcaagcccagcaagcgcagcttcatcgaggacctgctgttcaacaaagtgacactggccgacgccggattcatcaagcagtatggcgattgcctgggcgatattgccgcacgcgatctgatttgcgcccagaagtttaacggactgaccgtcctgccaccactgctgacagatgagatgatcgcccagtacacaagtgccctgctggccggaaccattaccagcggatggacatttggagccggtgccgctctgcagattcccttcgctatgcagatggcctaccgcttcaatggcattggcgtgacccagaatgtgctgtacgagaaccagaagctgatcgccaaccagttcaacagcgccatcggcaagattcaggacagcctgagtagtaccgccagcgctctgggaaagctgcaggatgtggtcaaccagaacgctcaggccctgaacaccctggttaagcagctgagcagcaacttcggcgccatcagtagcgtgctgaacgatatcctgagccgcctggatccaccagaagccgaggtgcagatcgatcgcctgattaccggacgcctgcagtccctgcagacctatgtgacacagcagctgatccgagccgccgagattcgagctagtgctaatctggccgccaccaagatgagcgaatgtgtgctgggacagagcaagcgcgtggacttttgcggcaagggataccacctgatgagcttcccacagagtgctccacacggcgtggtgtttctgcatgtgacctacgtgcccgctcaagagaagaatttcaccaccgctccagccatctgccacgacggaaaggcccattttccacgcgagggcgtgttcgttagcaacggcactcattggttcgtcacccagcgcaacttctacgagccccagatcatcaccaccgacaacaccttcgtcagcggcaactgcgacgtcgtgatcggcattgtgaacaacaccgtgtacgatccactgcagcccgagctggacagcttcaaagaggaactggacaagtactttaagaaccacacaagccccgacgtggacctgggagacattagcggaatcaacgccagcgtggtcaacatccagaaagagattgaccgcctgaacgaggtggccaagaatctgaacgagagcctgatcgacctgcaagaactgggcaaatacgagcagtacattaagtggccctggtacatctggctgggcttcattgccggactgattgccatcgtgatggtcaccattatgctgtgctgcatgaccagttgctgcagctgcctgaagggatgctgcagttgcggaagctgctgcaagttcgacgaggatgatagcgagccagtgctgaagggcgtcaagctgcactacacctgataagcgcgcctcgaggaattc

SEQ ID NO: 15 - protein, 604 aa, Artificial sequence
  Stabilized form of the S2 polypeptide (stab-S2) of nCoV
MFVFLVLLPLVSSQAGSVASQSIIAYTMSLGAENSVAYSNNSIAIPTNFTISVTTEILPVSMTKTSVDCTMYICGDSTECSNLLLQYGSFCTQLNRALTGIAVEQDKNTQEVFAQVKQIYKTPPIKDFGGFNFSQILPDPSKPSKRSFIEDLLFNKVTLADAGFIKQYGDCLGDIAARDLICAQKFNGLTVLPPLLTDEMIAQYTSALLAGTITSGWTFGAGAALQIPFAMQMAYRFNGIGVTQNVLYENQKLIANQFNSAIGKIQDSLSSTASALGKLQDVVNQNAQALNTLVKQLSSNFGAISSVLNDILSRLDPPEAEVQIDRLITGRLQSLQTYVTQQLIRAAEIRASANLAATKMSECVLGQSKRVDFCGKGYHLMSFPQSAPHGVVFLHVTYVPAQEKNFTTAPAICHDGKAHFPREGVFVSNGTHWFVTQRNFYEPQIITTDNTFVSGNCDVVIGIVNNTVYDPLQPELDSFKEELDKYFKNHTSPDVDLGDISGINASVVNIQKEIDRLNEVAKNLNESLIDLQELGKYEQYIKWPWYIWLGFIAGLIAIVMVTIMLCCMTSCCSCLKGCCSCGSCCKFDEDDSEPVLKGVKLHYT

SEQ ID NO: 16 - DNA, 3772 bp, Artificial sequence
  Codon-optimized nucleotide sequence of the soluble and trimerized form of the spike (tri-Secto) polypeptide of nCoV
actagctagcggatcccgtacggccaccatgttcgtgtttctggtgctgctgccactggtgtccagtcagtgcgtgaacctgaccacacgaacacagctgccaccagcctacaccaatagcttcacccgcggagtgtactaccccgacaaggtgttccgcagcagcgtgctgcatagcacccaggatctgtttctgcccttcttcagcaacgtgacctggttccacgccatccacgtgtccggcaccaatggcaccaagcgcttcgataatcccgtgctgcccttcaacgatggcgtgtactttgccagcaccgagaagtccaatatcatccgcggctggatcttcggcaccacactggatagcaagacccagagcctgctgatcgtgaacaacgccaccaacgtggtcatcaaagtgtgcgagttccagttctgcaacgaccccttcctgggcgtctactaccacaagaacaacaagagctggatggaaagcgagttccgcgtgtacagcagcgccaacaactgcaccttcgagtacgtgtcccagccattcctgatggacctggaaggcaagcagggcaacttcaagaacctgcgcgagttcgtgttcaagaacatcgacggctacttcaaaatctacagcaagcacaccccaatcaacctcgtgcgcgatctgccacagggattcagtgctctggaacccctggtggatctgcccatcggcatcaacattacccgctttcagacactgctggccctgcaccgcagttacttgacaccaggcgatagcagcagtggatggacagctggtgccgccgcttactacgttggatatctgcagccacgcacctttctgctgaagtacaacgagaacggcaccatcaccgacgccgtggattgtgctctcgatcccctgagcgagacaaagtgcaccctgaagtccttcaccgtcgagaagggcatctaccagaccagcaatttccgcgtgcagcccaccgagagcatcgtgcgcttccccaatatcaccaatctgtgccccttcggcgaggtgttcaatgccacacgctttgcctccgtgtacgcctggaatcgcaagcgcattagcaactgcgtggccgactactccgtgctgtacaatagcgccagcttcagcaccttcaagtgctacggcgtgtcacccaccaagctgaacgacctgtgcttcaccaatgtgtacgccgacagcttcgtgatccgcggagatgaagtgcgacagattgccccaggccagaccggcaagatcgccgactacaattacaagctgcccgacgacttcaccggctgcgtgatcgcctggaacagcaacaacctggattccaaagtcggcggcaactacaactacctgtaccgcctgttccgcaagagcaatctgaagcccttcgagcgcgacatcagcaccgaaatctaccaggccggaagcaccccatgcaacggcgtggaaggcttcaactgctacttcccactgcagtcctacggatttcagcccacaaatggcgtgggctaccagccatatcgagtggtggtgctgagcttcgaactgctgcatgctccagctaccgtgtgcggccccaagaagagtaccaacctggtcaagaacaaatgcgtgaacttcaacttcaacggcctgaccggaaccggcgtgctgaccgagagtaacaagaagttcctgccattccagcagtttggccgcgacattgccgatacaaccgatgccgttcgcgatccccagaccttggagatcctggatattaccccatgctccttcggcggcgtgtccgtgattacaccaggcaccaataccagcaaccaggtggccgttctgtaccaggatgtgaattgcacagaggtgcccgtggccattcacgccgatcaattgacaccaacatggcgcgtgtactccaccggcagcaatgtgtttcaaacccgcgctggatgcctgattggagccgagcacgtgaacaatagctacgagtgcgatatccccatcggagccggaatctgcgcctcctatcagacccagaccaatagtccacgacgagcccgaagtgtggccagccagagcatcattgcctataccatgagcctgggcgccgagaatagcgtggcctactccaacaacagcattgctatccccaccaacttcaccatcagcgtgaccaccgagatcctgccagtgtccatgaccaagaccagcgtggactgcaccatgtacatctgcggagatagcaccgagtgcagcaacctgctgctgcagtacggaagtttctgcacccagctgaatcgcgccctgacaggcattgccgtggaacaggataagaacacccaagaggtgttcgcccaagtgaagcaaatctacaagaccccaccaatcaaggatttcggcggcttcaatttcagccagattctgcccgatccaagcaagcccagcaagcgcagcttcatcgaggacctgctgttcaacaaagtgacactggccgacgccggattcatcaagcagtatggcgattgcctgggcgatattgccgcacgcgatctgatttgcgcccagaagtttaacggactgaccgtcctgccaccactgctgacagatgagatgatcgcccagtacacaagtgccctgctggccggaaccattaccagcggatggacatttggagccggtgccgctctgcagattcccttcgctatgcagatggcctaccgcttcaatggcattggcgtgacccagaatgtgctgtacgagaaccagaagctgatcgccaaccagttcaacagcgccatcggcaagattcaggacagcctgagtagtaccgccagcgctctgggaaagctgcaggatgtggtcaaccagaacgctcaggccctgaacaccctggttaagcagctgagcagcaacttcggcgccatcagtagcgtgctgaacgatatcctgagccgcctggataaggtggaagccgaggtgcagatcgatcgcctgattaccggacgcctgcagtccctgcagacctatgtgacacagcagctgatccgagccgccgagattcgagctagtgctaatctggccgccaccaagatgagcgaatgtgtgctgggacagagcaagcgcgtggacttttgcggcaagggataccacctgatgagcttcccacagagtgctccacacggcgtggtgtttctgcatgtgacctacgtgcccgctcaagagaagaatttcaccaccgctccagccatctgccacgacggaaaggcccattttccacgcgagggcgtgttcgttagcaacggcactcattggttcgtcacccagcgcaacttctacgagccccagatcatcaccaccgacaacaccttcgtcagcggcaactgcgacgtcgtgatcggcattgtgaacaacaccgtgtacgatccactgcagcccgagctggacagcttcaaagaggaactggacaagtactttaagaaccacacaagccccgacgtggacctgggagacattagcggaatcaacgccagcgtggtcaacatccagaaagagattgaccgcctgaacgaggtggccaagaatctgaacgagagcctgatcgacctgcaagaactgggcaaatacgagcagtacattaagtccggaggctacatccccgaggccccacgcgatggccaggcctacgtgcgcaaggacggcgagtgggtgctgctgtccaccttcctgtgataagcgcgcctcgaggaattc

SEQ ID NO: 17 - protein, 1240 aa, Artificial sequence
  Soluble and trimerized form of the spike (tri-Secto) polypeptide of nCoV
MFVFLVLLPLVSSQCVNLTTRTQLPPAYTNSFTRGVYYPDKVFRSSVLHSTQDLFLPFFSNVTWFHAIHVSGTNGTKRFDNPVLPFNDGVYFASTEKSNIIRGWIFGTTLDSKTQSLLIVNNATNVVIKVCEFQFCNDPFLGVYYHKNNKSWMESEFRVYSSANNCTFEYVSQPFLMDLEGKQGNFKNLREFVFKNIDGYFKIYSKHTPINLVRDLPQGFSALEPLVDLPIGINITRFQTLLALHRSYLTPGDSSSGWTAGAAAYYVGYLQPRTFLLKYNENGTITDAVDCALDPLSETKCTLKSFTVEKGIYQTSNFRVQPTESIVRFPNITNLCPFGEVFNATRFASVYAWNRKRISNCVADYSVLYNSASFSTFKCYGVSPTKLNDLCFTNVYADSFVIRGDEVRQIAPGQTGKIADYNYKLPDDFTGCVIAWNSNNLDSKVGGNYNYLYRLFRKSNLKPFERDISTEIYQAGSTPCNGVEGFNCYFPLQSYGFQPTNGVGYQPYRVVVLSFELLHAPATVCGPKKSTNLVKNKCVNFNFNGLTGTGVLTESNKKFLPFQQFGRDIADTTDAVRDPQTLEILDITPCSFGGVSVITPGTNTSNQVAVLYQDVNCTEVPVAIHADQLTPTWRVYSTGSNVFQTRAGCLIGAEHVNNSYECDIPIGAGICASYQTQTNSPRRARSVASQSIIAYTMSLGAENSVAYSNNSIAIPTNFTISVTTEILPVSMTKTSVDCTMYICGDSTECSNLLLQYGSFCTQLNRALTGIAVEQDKNTQEVFAQVKQIYKTPPIKDFGGFNFSQILPDPSKPSKRSFIEDLLFNKVTLADAGFIKQYGDCLGDIAARDLICAQKFNGLTVLPPLLTDEMIAQYTSALLAGTITSGWTFGAGAALQIPFAMQMAYRFNGIGVTQNVLYENQKLIANQFNSAIGKIQDSLSSTASALGKLQDVVNQNAQALNTLVKQLSSNFGAISSVLNDILSRLDKVEAEVQIDRLITGRLQSLQTYVTQQLIRAAEIRASANLAATKMSECVLGQSKRVDFCGKGYHLMSFPQSAPHGVVFLHVTYVPAQEKNFTTAPAICHDGKAHFPREGVFVSNGTHWFVTQRNFYEPQIITTDNTFVSGNCDVVIGIVNNTVYDPLQPELDSFKEELDKYFKNHTSPDVDLGDISGINASVVNIQKEIDRLNEVAKNLNESLIDLQELGKYEQYIKSGGYIPEAPRDGQAYVRKDGEWVLLSTFL

SEQ ID NO: 18 - DNA, 3772 bp, Artificial sequence
  Codon-optimized nucleotide sequence of the stabilized and trimerized form of the spike ectodomain (tristab-Secto) polypeptide of nCoV
actagctagcagatctcgtacggccaccatgttcgtgtttctggtgctgctgccactggtgtccagtcagtgcgtgaacctgaccacacgaacacagctgccaccagcctacaccaatagcttcacccgcggagtgtactaccccgacaaggtgttccgcagcagcgtgctgcatagcacccaggatctgtttctgcccttcttcagcaacgtgacctggttccacgccatccacgtgtccggcaccaatggcaccaagcgcttcgataatcccgtgctgcccttcaacgatggcgtgtactttgccagcaccgagaagtccaatatcatccgcggctggatcttcggcaccacactggatagcaagacccagagcctgctgatcgtgaacaacgccaccaacgtggtcatcaaagtgtgcgagttccagttctgcaacgaccccttcctgggcgtctactaccacaagaacaacaagagctggatggaaagcgagttccgcgtgtacagcagcgccaacaactgcaccttcgagtacgtgtcccagccattcctgatggacctggaaggcaagcagggcaacttcaagaacctgcgcgagttcgtgttcaagaacatcgacggctacttcaaaatctacagcaagcacaccccaatcaacctcgtgcgcgatctgccacagggattcagtgctctggaacccctggtggatctgcccatcggcatcaacattacccgctttcagacactgctggccctgcaccgcagttacttgacaccaggcgatagcagcagtggatggacagctggtgccgccgcttactacgttggatatctgcagccacgcacctttctgctgaagtacaacgagaacggcaccatcaccgacgccgtggattgtgctctcgatcccctgagcgagacaaagtgcaccctgaagtccttcaccgtcgagaagggcatctaccagaccagcaatttccgcgtgcagcccaccgagagcatcgtgcgcttccccaatatcaccaatctgtgccccttcggcgaggtgttcaatgccacacgctttgcctccgtgtacgcctggaatcgcaagcgcattagcaactgcgtggccgactactccgtgctgtacaatagcgccagcttcagcaccttcaagtgctacggcgtgtcacccaccaagctgaacgacctgtgcttcaccaatgtgtacgccgacagcttcgtgatccgcggagatgaagtgcgacagattgccccaggccagaccggcaagatcgccgactacaattacaagctgcccgacgacttcaccggctgcgtgatcgcctggaacagcaacaacctggattccaaagtcggcggcaactacaactacctgtaccgcctgttccgcaagagcaatctgaagcccttcgagcgcgacatcagcaccgaaatctaccaggccggaagcaccccatgcaacggcgtggaaggcttcaactgctacttcccactgcagtcctacggatttcagcccacaaatggcgtgggctaccagccatatcgagtggtggtgctgagcttcgaactgctgcatgctccagctaccgtgtgcggccccaagaagagtaccaacctggtcaagaacaaatgcgtgaacttcaacttcaacggcctgaccggaaccggcgtgctgaccgagagtaacaagaagttcctgccattccagcagtttggccgcgacattgccgatacaaccgatgccgttcgcgatccccagaccttggagatcctggatattaccccatgctccttcggcggcgtgtccgtgattacaccaggcaccaataccagcaaccaggtggccgttctgtaccaggatgtgaattgcacagaggtgcccgtggccattcacgccgatcaattgacaccaacatggcgcgtgtactccaccggcagcaatgtgtttcaaacccgcgctggatgcctgattggagccgagcacgtgaacaatagctacgagtgcgatatccccatcggagccggaatctgcgcctcctatcagacccagaccaatagtccacgacgagcccgaagtgtggccagccagagcatcattgcctataccatgagcctgggcgccgagaatagcgtggcctactccaacaacagcattgctatccccaccaacttcaccatcagcgtgaccaccgagatcctgccagtgtccatgaccaagaccagcgtggactgcaccatgtacatctgcggagatagcaccgagtgcagcaacctgctgctgcagtacggaagtttctgcacccagctgaatcgcgccctgacaggcattgccgtggaacaggataagaacacccaagaggtgttcgcccaagtgaagcaaatctacaagaccccaccaatcaaggatttcggcggcttcaatttcagccagattctgcccgatccaagcaagcccagcaagcgcagcttcatcgaggacctgctgttcaacaaagtgacactggccgacgccggattcatcaagcagtatggcgattgcctgggcgatattgccgcacgcgatctgatttgcgcccagaagtttaacggactgaccgtcctgccaccactgctgacagatgagatgatcgcccagtacacaagtgccctgctggccggaaccattaccagcggatggacatttggagccggtgccgctctgcagattcccttcgctatgcagatggcctaccgcttcaatggcattggcgtgacccagaatgtgctgtacgagaaccagaagctgatcgccaaccagttcaacagcgccatcggcaagattcaggacagcctgagtagtaccgccagcgctctgggaaagctgcaggatgtggtcaaccagaacgctcaggccctgaacaccctggttaagcagctgagcagcaacttcggcgccatcagtagcgtgctgaacgatatcctgagccgcctggatccaccagaagccgaggtgcagatcgatcgcctgattaccggacgcctgcagtccctgcagacctatgtgacacagcagctgatccgagccgccgagattcgagctagtgctaatctggccgccaccaagatgagcgaatgtgtgctgggacagagcaagcgcgtggacttttgcggcaagggataccacctgatgagcttcccacagagtgctccacacggcgtggtgtttctgcatgtgacctacgtgcccgctcaagagaagaatttcaccaccgctccagccatctgccacgacggaaaggcccattttccacgcgagggcgtgttcgttagcaacggcactcattggttcgtcacccagcgcaacttctacgagccccagatcatcaccaccgacaacaccttcgtcagcggcaactgcgacgtcgtgatcggcattgtgaacaacaccgtgtacgatccactgcagcccgagctggacagcttcaaagaggaactggacaagtactttaagaaccacacaagccccgacgtggacctgggagacattagcggaatcaacgccagcgtggtcaacatccagaaagagattgaccgcctgaacgaggtggccaagaatctgaacgagagcctgatcgacctgcaagaactgggcaaatacgagcagtacattaagtccggaggctacatccccgaggccccacgcgatggccaggcctacgtgcgcaaggacggcgagtgggtgctgctgtccaccttcctgtgataagcgcgcctcgaggaattc

SEQ ID NO: 19 - protein, 1240 aa, Artificial sequence
  Stabilized and trimerized form of the spike ectodomain (tristab-Secto) polypeptide of nCoV
MFVFLVLLPLVSSQCVNLTTRTQLPPAYTNSFTRGVYYPDKVFRSSVLHSTQDLFLPFFSNVTWFHAIHVSGTNGTKRFDNPVLPFNDGVYFASTEKSNIIRGWIFGTTLDSKTQSLLIVNNATNVVIKVCEFQFCNDPFLGVYYHKNNKSWMESEFRVYSSANNCTFEYVSQPFLMDLEGKQGNFKNLREFVFKNIDGYFKIYSKHTPINLVRDLPQGFSALEPLVDLPIGINITRFQTLLALHRSYLTPGDSSSGWTAGAAAYYVGYLQPRTFLLKYNENGTITDAVDCALDPLSETKCTLKSFTVEKGIYQTSNFRVQPTESIVRFPNITNLCPFGEVFNATRFASVYAWNRKRISNCVADYSVLYNSASFSTFKCYGVSPTKLNDLCFTNVYADSFVIRGDEVRQIAPGQTGKIADYNYKLPDDFTGCVIAWNSNNLDSKVGGNYNYLYRLFRKSNLKPFERDISTEIYQAGSTPCNGVEGFNCYFPLQSYGFQPTNGVGYQPYRVVVLSFELLHAPATVCGPKKSTNLVKNKCVNFNFNGLTGTGVLTESNKKFLPFQQFGRDIADTTDAVRDPQTLEILDITPCSFGGVSVITPGTNTSNQVAVLYQDVNCTEVPVAIHADQLTPTWRVYSTGSNVFQTRAGCLIGAEHVNNSYECDIPIGAGICASYQTQTNSPRRARSVASQSIIAYTMSLGAENSVAYSNNSIAIPTNFTISVTTEILPVSMTKTSVDCTMYICGDSTECSNLLLQYGSFCTQLNRALTGIAVEQDKNTQEVFAQVKQIYKTPPIKDFGGFNFSQILPDPSKPSKRSFIEDLLFNKVTLADAGFIKQYGDCLGDIAARDLICAQKFNGLTVLPPLLTDEMIAQYTSALLAGTITSGWTFGAGAALQIPFAMQMAYRFNGIGVTQNVLYENQKLIANQFNSAIGKIQDSLSSTASALGKLQDVVNQNAQALNTLVKQLSSNFGAISSVLNDILSRLDPPEAEVQIDRLITGRLQSLQTYVTQQLIRAAEIRASANLAATKMSECVLGQSKRVDFCGKGYHLMSFPQSAPHGVVFLHVTYVPAQEKNFTTAPAICHDGKAHFPREGVFVSNGTHWFVTQRNFYEPQIITTDNTFVSGNCDVVIGIVNNTVYDPLQPELDSFKEELDKYFKNHTSPDVDLGDISGINASVVNIQKEIDRLNEVAKNLNESLIDLQELGKYEQYIKSGGYIPEAPRDGQAYVRKDGEWVLLSTFL

SEQ ID NO: 20 - DNA, 1308 bp, Artificial sequence
  Native nucleotide sequence of the N polypeptide of CoV
gctagcggatcccgtacggccaccatgtctgataatggaccccaaaatcagcgaaatgcaccccgcattacgtttggtggaccctcagattcaactggcagtaaccagaatggagaacgcagtggggcgcgatcaaaacaacgtcggccccaaggtttacccaataatactgcgtcttggttcaccgctctcactcaacatggcaaggaagaccttaaattccctcgaggacaaggcgttccaattaacaccaatagcagtccagatgaccaaattggctactaccgaagagctaccagacgaattcgtggtggtgacggtaaaatgaaagatctcagtccaagatggtatttctactacctaggaactgggccagaagctggacttccctatggtgctaacaaagacggcatcatatgggttgcaactgagggagccttgaatacaccaaaagatcacattggcacccgcaatcctgctaacaatgctgcaatcgtgctacaacttcctcaaggaacaacattgccaaaaggcttctacgcagaagggagcagaggcggcagtcaagcctcttctcgttcctcatcacgtagtcgcaacagttcaagaaattcaactccaggcagcagtaggggaacttctcctgctagaatggctggcaatggcggtgatgctgctcttgctttgctgctgcttgacagattgaaccagcttgagagcaaaatgtctggtaaaggccaacaacaacaaggccaaactgtcactaagaaatctgctgctgaggcttctaagaagcctcggcaaaaacgtactgccactaaagcatacaatgtaacacaagctttcggcagacgtggtccagaacaaacccaaggaaattttggggaccaggaactaatcagacaaggaactgattacaaacattggccgcaaattgcacaatttgcccccagcgcttcagcgttcttcggaatgtcgcgcattggcatggaagtcacaccttcgggaacgtggttgacctacacaggtgccatcaaattggatgacaaagatccaaatttcaaagatcaagtcattttgctgaataagcatattgacgcatacaaaacattcccaccaacagagcctaaaaaggacaaaaagaagaaggctgatgaaactcaagccttaccgcagagacagaagaaacagcaaactgtgactcttcttcctgctgcagatttggatgatttctccaaacaattgcaacaatccatgagcagtgctgactcaactcaggcctgataacgagcgcgcctcgaggaattc

SEQ ID NO: 21 - DNA, 1308 bp, Artificial sequence
  Codon-optimized nucleotide sequence of the N polypeptide of CoV
gctagcggatcccgtacggccaccatgagcgataatggaccccagaatcagcgcaacgccccacgcattaccttcggaggaccaagcgatagcaccggcagcaatcagaatggcgaacgaagcggagcccgaagcaaacagcgacgaccacagggactgccaaacaacaccgccagttggtttaccgctctgacccagcacggcaaagaggacctgaagtttccacgaggacagggcgtgcccatcaacaccaatagcagcccagacgaccagatcggctactatcgacgagccacacgacgcattcgaggcggcgacggaaagatgaaggatctgagcccacgctggtacttctactacctcggaacaggaccagaggccggactgccatatggtgccaacaaggatggcatcatctgggttgccaccgaaggcgccctgaacaccccaaaggatcacattggaacccgcaatccagccaacaacgccgccattgtgctgcagttgccacagggaacaacactgcccaagggattctacgctgagggaagtcgcggaggaagccaggccagtagtcgcagtagtagccgcagccgcaatagctcccgaaatagcacacccggaagcagccgaggaaccagtccagctcgaatggctggaaatggcggagatgctgctctggctctgctgctgctggatcgcctgaatcagctggaaagcaagatgagcggcaagggccagcagcaacagggacagaccgtgacaaagaagagtgccgccgaagccagcaagaagccacgacagaagcgaaccgccaccaaggcctataatgtgacccaggcctttggacgacgcggaccagaacagacccagggcaatttcggcgatcaagagctgattcgccagggcaccgattacaagcactggccacagattgcccagtttgccccaagcgccagcgccttctttggaatgagccgcatcggaatggaagtgaccccaagtggaacctggctgacctacacaggcgccatcaagctggatgacaaggaccccaacttcaaggaccaagtgatcctgctgaacaagcacatcgacgcctacaagacctttccaccaactgagcccaagaaggacaagaagaagaaggccgacgagacacaggctctgccacagcgccaaaagaagcagcagaccgttacactgctgccagccgccgacctggatgatttttccaaacagctgcagcagtccatgagcagcgccgatagcacacaggcctgataacgagcgcgcctcgaggaattc

SEQ ID NO: 22 - protein, 419 aa, Artificial sequence
  N polypeptide of CoV
MSDNGPQNQRNAPRITFGGPSDSTGSNQNGERSGARSKQRRPQGLPNNTASWFTALTQHGKEDLKFPRGQGVPINTNSSPDDQIGYYRRATRRIRGGDGKMKDLSPRWYFYYLGTGPEAGLPYGANKDGIIWVATEGALNTPKDHIGTRNPANNAAIVLQLPQGTTLPKGFYAEGSRGGSQASSRSSSRSRNSSRNSTPGSSRGTSPARMAGNGGDAALALLLLDRLNQLESKMSGKGQQQQGQTVTKKSAAEASKKPRQKRTATKAYNVTQAFGRRGPEQTQGNFGDQELIRQGTDYKHWPQIAQFAPSASAFFGMSRIGMEVTPSGTWLTYTGAIKLDDKDPNFKDQVILLNKHIDAYKTFPPTEPKKDKKKKADETQALPQRQKKQQTVTLLPAADLDDFSKQLQQSMSSADSTQA

SEQ ID NO: 23 - protein, 75 aa, Artificial sequence
  E polypeptide of CoV
MYSFVSEETGTLIVNSVLLFLAFVVFLLVTLAILTALRLCAYCCNIVNVSLVKPSFYVYSRVKNLNSSRVPDLLV

SEQ ID NO: 24 - protein, 222 aa, Artificial sequence
  M polypeptide of CoV
MADSNGTITVEELKKLLEQWNLVIGFLFLTWICLLQFAYANRNRFLYIIKLIFLWLLWPVTLACFVLAAVYRINWITGGIAIAMACLVGLMWLSYFIASFRLFARTRSMWSFNPETNILLNVPLHGTILTRPLLESELVIGAVILRGHLRIAGHHLGRCDIKDLPKEITVATSRTLSYYKLGASQRVAGDSGFAAYSRYRIGNYKLNTDHSSSSDNIALLVQ

SEQ ID NO: 25 - protein, 121 aa, Artificial sequence
  ORF8 polypeptide of CoV
MKFLVFLGIITTVAAFHQECSLQSCTQHQPYVVDDPCPIHFYSKWYIRVGARKSAPLIELCVDEAGSKSPIQYIDIGNYTVSCLPFTINCQEPKLGSLVVRCSFYEDFLEYHDVRVVLDFI

SEQ ID NO: 26 - protein, 275 aa, Artificial sequence
  ORF3a polypeptide of CoV
MDLFMRIFTIGTVTLKQGEIKDATPSDFVRATATIPIQASLPFGWLIVGVALLAVFQSASKIITLKKRWQLALSKGVHFVCNLLLLFVTVYSHLLLVAAGLEAPFLYLYALVYFLQSINFVRIIMRLWLCWKCRSKNPLLYDANYFLCWHTNCYDYCIPYNSVTSSIVITSGDGTTSPISEHDYQIGGYTEKWESGVKDCVVLHSYFTSDYYQLYSTQLSTDTGVEHVTFFIYNKIVDEPEEHVQIHTIDGSSGVVNPVMEPIYDEPTTTTSVPL

SEQ ID NO: 27 - protein, 121 aa, Artificial sequence
  ORF7a polypeptide of CoV
MKIILFLALITLATCELYHYQECVRGTTVLLKEPCSSGTYEGNSPFHPLADNKFALTCFSTQFAFACPDGVKHVYQLRARSVSPKLFIRQEEVQELYSPIFLIVAAIVFITLCFTLKRKTE

SEQ ID NO: 28 - DNA, 18967 bp, Artificial sequence
  pTM-MVSchw
gcggccgctaatacgactcactatagggccaactttgtttggtctgatgagtccgtgaggacgaaacccggagtcccgggtcaccaaacaaagttgggtaaggatagttcaatcaatgatcatcttctagtgcacttaggattcaagatcctattatcagggacaagagcaggattagggatatccgagatggccacacttttaaggagcttagcattgttcaaaagaaacaaggacaaaccacccattacatcaggatccggtggagccatcagaggaatcaaacacattattatagtaccaatccctggagattcctcaattaccactcgatccagacttctggaccggttggtgaggttaattggaaacccggatgtgagcgggcccaaactaacaggggcactaataggtatattatccttatttgtggagtctccaggtcaattgattcagaggatcaccgatgaccctgacgttagcataaggctgttagaggttgtccagagtgaccagtcacaatctggccttaccttcgcatcaagaggtaccaacatggaggatgaggcggaccaatacttttcacatgatgatccaattagtagtgatcaatccaggttcggatggttcgggaacaaggaaatctcagatattgaagtgcaagaccctgagggattcaacatgattctgggtaccatcctagcccaaatttgggtcttgctcgcaaaggcggttacggccccagacacggcagctgattcggagctaagaaggtggataaagtacacccaacaaagaagggtagttggtgaatttagattggagagaaaatggttggatgtggtgaggaacaggattgccgaggacctctccttacgccgattcatggtcgctctaatcctggatatcaagagaacacccggaaacaaacccaggattgctgaaatgatatgtgacattgatacatatatcgtagaggcaggattagccagttttatcctgactattaagtttgggatagaaactatgtatcctgctcttggactgcatgaatttgctggtgagttatccacacttgagtccttgatgaacctttaccagcaaatgggggaaactgcaccctacatggtaatcctggagaactcaattcagaacaagttcagtgcaggatcataccctctgctctggagctatgccatgggagtaggagtggaacttgaaaactccatgggaggtttgaactttggccgatcttactttgatccagcatattttagattagggcaagagatggtaaggaggtcagctggaaaggtcagttccacattggcatctgaactcggtatcactgccgaggatgcaaggcttgtttcagagattgcaatgcatactactgaggacaagatcagtagagcggttggacccagacaagcccaagtatcatttctacacggtgatcaaagtgagaatgagctaccgagattggggggcaaggaagataggagggtcaaacagagtcgaggagaagccagggagagctacagagaaaccgggcccagcagagcaagtgatgcgagagctgcccatcttccaaccggcacacccctagacattgacactgcaacggagtccagccaagatccgcaggacagtcgaaggtcagctgacgccctgcttaggctgcaagccatggcaggaatctcggaagaacaaggctcagacacggacacccctatagtgtacaatgacagaaatcttctagactaggtgcgagaggccgagggccagaacaacatccgcctaccatccatcattgttataaaaaacttaggaaccaggtccacacagccgccagcccatcaaccatccactcccacgattggagccaatggcagaagagcaggcacgccatgtcaaaaacggactggaatgcatccgggctctcaaggccgagcccatcggctcactggccatcgaggaagctatggcagcatggtcagaaatatcagacaacccaggacaggagcgagccacctgcagggaagagaaggcaggcagttcgggtctcagcaaaccatgcctctcagcaattggatcaactgaaggcggtgcacctcgcatccgcggtcagggacctggagagagcgatgacgacgctgaaactttgggaatccccccaagaaatctccaggcatcaagcactgggttacagtgttattacgtttatgatcacagcggtgaagcggttaagggaatccaagatgctgactctatcatggttcaatcaggccttgatggtgatagcaccctctcaggaggagacaatgaatctgaaaacagcgatgtggatattggcgaacctgataccgagggatatgctatcactgaccggggatctgctcccatctctatggggttcagggcttctgatgttgaaactgcagaaggaggggagatccacgagctcctgagactccaatccagaggcaacaactttccgaagcttgggaaaactctcaatgttcctccgcccccggaccccggtagggccagcacttccgggacacccattaaaaagggcacagacgcgagattagcctcatttggaacggagatcgcgtctttattgacaggtggtgcaacccaatgtgctcgaaagtcaccctcggaaccatcagggccaggtgcacctgcggggaatgtccccgagtgtgtgagcaatgccgcactgatacaggagtggacacccgaatctggtaccacaatctccccgagatcccagaataatgaagaagggggagactattatgatgatgagctgttctctgatgtccaagatattaaaacagccttggccaaaatacacgaggataatcagaagataatctccaagctagaatcactgctgttattgaagggagaagttgagtcaattaagaagcagatcaacaggcaaaatatcagcatatccaccctggaaggacacctctcaagcatcatgatcgccattcctggacttgggaaggatcccaacgaccccactgcagatgtcgaaatcaatcccgacttgaaacccatcataggcagagattcaggccgagcactggccgaagttctcaagaaacccgttgccagccgacaactccaaggaatgacaaatggacggaccagttccagaggacagctgctgaaggaatttcagctaaagccgatcgggaaaaagatgagctcagccgtcgggtttgttcctgacaccggccctgcatcacgcagtgtaatccgctccattataaaatccagccggctagaggaggatcggaagcgttacctgatgactctccttgatgatatcaaaggagccaatgatcttgccaagttccaccagatgctgatgaagataataatgaagtagctacagctcaacttacctgccaaccccatgccagtcgacccaactagtacaacctaaatccattataaaaaacttaggagcaaagtgattgcctcccaaggtccacaatgacagagacctacgacttcgacaagtcggcatgggacatcaaagggtcgatcgctccgatacaacccaccacctacagtgatggcaggctggtgccccaggtcagagtcatagatcctggtctaggcgacaggaaggatgaatgctttatgtacatgtttctgctgggggttgttgaggacagcgattccctagggcctccaatcgggcgagcatttgggttcctgcccttaggtgttggcagatccacagcaaagcccgaaaaactcctcaaagaggccactgagcttgacatagttgttagacgtacagcagggctcaatgaaaaactggtgttctacaacaacaccccactaactctcctcacaccttggagaaaggtcctaacaacagggagtgtcttcaacgcaaaccaagtgtgcaatgcggttaatctgataccgctcgataccccgcagaggttccgtgttgtttatatgagcatcacccgtctttcggataacgggtattacaccgttcctagaagaatgctggaattcagatcggtcaatgcagtggccttcaacctgctggtgacccttaggattgacaaggcgataggccctgggaagatcatcgacaatacagagcaacttcctgaggcaacatttatggtccacatcgggaacttcaggagaaagaagagtgaagtctactctgccgattattgcaaaatgaaaatcgaaaagatgggcctggtttttgcacttggtgggatagggggcaccagtcttcacattagaagcacaggcaaaatgagcaagactctccatgcacaactcgggttcaagaagaccttatgttacccgctgatggatatcaatgaagaccttaatcgattactctggaggagcagatgcaagatagtaagaatccaggcagttttgcagccatcagttcctcaagaattccgcatttacgacgacgtgatcataaatgatgaccaaggactattcaaagttctgtagaccgtagtgcccagcaatgcccgaaaacgacccccctcacaatgacagccagaaggcccggacaaaaaagccccctccgaaagactccacggaccaagcgagaggccagccagcagccgacggcaagcgcgaacaccaggcggccccagcacagaacagccctgacacaaggccaccaccagccaccccaatctgcatcctcctcgtgggacccccgaggaccaacccccaaggctgcccccgatccaaaccaccaaccgcatccccaccacccccgggaaagaaacccccagcaattggaaggcccctccccctcttcctcaacacaagaactccacaaccgaaccgcacaagcgaccgaggtgacccaaccgcaggcatccgactccctagacagatcctctctccccggcaaactaaacaaaacttagggccaaggaacatacacacccaacagaacccagaccccggcccacggcgccgcgcccccaacccccgacaaccagagggagcccccaaccaatcccgccggctcccccggtgcccacaggcagggacaccaacccccgaacagacccagcacccaaccatcgacaatccaagacgggggggcccccccaaaaaaaggcccccaggggccgacagccagcaccgcgaggaagcccacccaccccacacacgaccacggcaaccaaaccagaacccagaccaccctgggccaccagctcccagactcggccatcaccccgcagaaaggaaaggccacaacccgcgcaccccagccccgatccggcggggagccacccaacccgaaccagcacccaagagcgatccccgaaggacccccgaaccgcaaaggacatcagtatcccacagcctctccaagtcccccggtctcctcctcttctcgaagggaccaaaagatcaatccaccacacccgacgacactcaactccccacccctaaaggagacaccgggaatcccagaatcaagactcatccaatgtccatcatgggtctcaaggtgaacgtctctgccatattcatggcagtactgttaactctccaaacacccaccggtcaaatccattggggcaatctctctaagataggggtggtaggaataggaagtgcaagctacaaagttatgactcgttccagccatcaatcattagtcataaaattaatgcccaatataactctcctcaataactgcacgagggtagagattgcagaatacaggagactactgagaacagttttggaaccaattagagatgcacttaatgcaatgacccagaatataagaccggttcagagtgtagcttcaagtaggagacacaagagatttgcgggagtagtcctggcaggtgcggccctaggcgttgccacagctgctcagataacagccggcattgcacttcaccagtccatgctgaactctcaagccatcgacaatctgagagcgagcctggaaactactaatcaggcaattgagacaatcagacaagcagggcaggagatgatattggctgttcagggtgtccaagactacatcaataatgagctgataccgtctatgaaccaactatcttgtgatttaatcggccagaagctcgggctcaaattgctcagatactatacagaaatcctgtcattatttggccccagtttacgggaccccatatctgcggagatatctatccaggctttgagctatgcgcttggaggagacatcaataaggtgttagaaaagctcggatacagtggaggtgatttactgggcatcttagagagcggaggaataaaggcccggataactcacgtcgacacagagtcctacttcattgtcctcagtatagcctatccgacgctgtccgagattaagggggtgattgtccaccggctagagggggtctcgtacaacataggctctcaagagtggtataccactgtgcccaagtatgttgcaacccaagggtaccttatctcgaattttgatgagtcatcgtgtactttcatgccagaggggactgtgtgcagccaaaatgccttgtacccgatgagtcctctgctccaagaatgcctccgggggtacaccaagtcctgtgctcgtacactcgtatccgggtcttttgggaaccggttcattttatcacaagggaacctaatagccaattgtgcatcaatcctttgcaagtgttacacaacaggaacgatcattaatcaagaccctgacaagatcctaacatacattgctgccgatcactgcccggtagtcgaggtgaacggcgtgaccatccaagtcgggagcaggaggtatccagacgctgtgtacttgcacagaattgacctcggtcctcccatatcattggagaggttggacgtagggacaaatctggggaatgcaattgctaagttggaggatgccaaggaattgttggagtcatcggaccagatattgaggagtatgaaaggtttatcgagcactagcatagtctacatcctgattgcagtgtgtcttggagggttgatagggatccccgctttaatatgttgctgcagggggcgttgtaacaaaaagggagaacaagttggtatgtcaagaccaggcctaaagcctgatcttacgggaacatcaaaatcctatgtaaggtcgctctgatcctctacaactcttgaaacacaaatgtcccacaagtctcctcttcgtcatcaagcaaccaccgcacccagcatcaagcccacctgaaattatctccggcttccctctggccgaacaatatcggtagttaatcaaaacttagggtgcaagatcatccacaatgtcaccacaacgagaccggataaatgccttctacaaagataacccccatcccaagggaagtaggatagtcattaacagagaacatcttatgattgatagaccttatgttttgctggctgttctgtttgtcatgtttctgagcttgatcgggttgctagccattgcaggcattagacttcatcgggcagccatctacaccgcagagatccataaaagcctcagcaccaatctagatgtaactaactcaatcgagcatcaggtcaaggacgtgctgacaccactcttcaaaatcatcggtgatgaagtgggcctgaggacacctcagagattcactgacctagtgaaattaatctctgacaagattaaattccttaatccggatagggagtacgacttcagagatctcacttggtgtatcaacccgccagagagaatcaaattggattatgatcaatactgtgcagatgtggctgctgaagagctcatgaatgcattggtgaactcaactctactggagaccagaacaaccaatcagttcctagctgtctcaaagggaaactgctcagggcccactacaatcagaggtcaattctcaaacatgtcgctgtccctgttagacttgtatttaggtcgaggttacaatgtgtcatctatagtcactatgacatcccagggaatgtatgggggaacttacctagtggaaaagcctaatctgagcagcaaaaggtcagagttgtcacaactgagcatgtaccgagtgtttgaagtaggtgttatcagaaatccgggtttgggggctccggtgttccatatgacaaactatcttgagcaaccagtcagtaatgatctcagcaactgtatggtggctttgggggagctcaaactcgcagccctttgtcacggggaagattctatcacaattccctatcagggatcagggaaaggtgtcagcttccagctcgtcaagctaggtgtctggaaatccccaaccgacatgcaatcctgggtccccttatcaacggatgatccagtgatagacaggctttacctctcatctcacagaggtgttatcgctgacaatcaagcaaaatgggctgtcccgacaacacgaacagatgacaagttgcgaatggagacatgcttccaacaggcgtgtaagggtaaaatccaagcactctgcgagaatcccgagtgggcaccattgaaggataacaggattccttcatacggggtcttgtctgttgatctgagtctgacagttgagcttaaaatcaaaattgcttcgggattcgggccattgatcacacacggttcagggatggacctatacaaatccaaccacaacaatgtgtattggctgactatcccgccaatgaagaacctagccttaggtgtaatcaacacattggagtggataccgagattcaaggttagtccctacctcttcactgtcccaattaaggaagcaggcgaagactgccatgccccaacatacctacctgcggaggtggatggtgatgtcaaactcagttccaatctggtgattctacctggtcaagatctccaatatgttttggcaacctacgatacttccagggttgaacatgctgtggtttattacgtttacagcccaagccgctcattttcttacttttatccttttaggttgcctataaagggggtccccatcgaattacaagtggaatgcttcacatgggaccaaaaactctggtgccgtcacttctgtgtgcttgcggactcagaatctggtggacatatcactcactctgggatggtgggcatgggagtcagctgcacagtcacccgggaagatggaaccaatcgcagatagggctgctagtgaaccaatcacatgatgtcacccagacatcaggcatacccactagtgtgaaatagacatcagaattaagaaaaacgtagggtccaagtggttccccgttatggactcgctatctgtcaaccagatcttataccctgaagttcacctagatagcccgatagttaccaataagatagtagccatcctggagtatgctcgagtccctcacgcttacagcctggaggaccctacactgtgtcagaacatcaagcaccgcctaaaaaacggattttccaaccaaatgattataaacaatgtggaagttgggaatgtcatcaagtccaagcttaggagttatccggcccactctcatattccatatccaaattgtaatcaggatttatttaacatagaagacaaagagtcaacgaggaagatccgtgaactcctcaaaaaggggaattcgctgtactccaaagtcagtgataaggttttccaatgcttaagggacactaactcacggcttggcctaggctccgaattgagggaggacatcaaggagaaagttattaacttgggagtttacatgcacagctcccagtggtttgagccctttctgttttggtttacagtcaagactgagatgaggtcagtgattaaatcacaaacccatacttgccataggaggagacacacacctgtattcttcactggtagttcagttgagttgctaatctctcgtgaccttgttgctataatcagtaaagagtctcaacatgtatattacctgacatttgaactggttttgatgtattgtgatgtcatagaggggaggttaatgacagagaccgctatgactattgatgctaggtatacagagcttctaggaagagtcagatacatgtggaaactgatagatggtttcttccctgcactcgggaatccaacttatcaaattgtagccatgctggagcctctttcacttgcttacctgcagctgagggatataacagtagaactcagaggtgctttccttaaccactgctttactgaaatacatgatgttcttgaccaaaacgggttttctgatgaaggtacttatcatgagttaactgaagctctagattacattttcataactgatgacatacatctgacaggggagattttctcatttttcagaagtttcggccaccccagacttgaagcagtaacggctgctgaaaatgttaggaaatacatgaatcagcctaaagtcattgtgtatgagactctgatgaaaggtcatgccatattttgtggaatcataatcaacggctatcgtgacaggcacggaggcagttggccaccgctgaccctccccctgcatgctgcagacacaatccggaatgctcaagcttcaggtgaagggttaacacatgagcagtgcgttgataactggaaatcttttgctggagtgaaatttggctgctttatgcctcttagcctggatagtgatctgacaatgtacctaaaggacaaggcacttgctgctctccaaagggaatgggattcagtttacccgaaagagttcctgcgttacgaccctcccaagggaaccgggtcacggaggcttgtagatgttttccttaatgattcgagctttgacccatatgatgtgataatgtatgttgtaagtggagcttacctccatgaccctgagttcaacctgtcttacagcctgaaagaaaaggagatcaaggaaacaggtagactttttgctaaaatgacttacaaaatgagggcatgccaagtgattgctgaaaatctaatctcaaacgggattggcaaatattttaaggacaatgggatggccaaggatgagcacgatttgactaaggcactccacactctagctgtctcaggagtccccaaagatctcaaagaaagtcacaggggggggccagtcttaaaaacctactcccgaagcccagtccacacaagtaccaggaacgtgagagcagcaaaagggtttatagggttccctcaagtaattcggcaggaccaagacactgatcatccggagaatatggaagcttacgagacagtcagtgcatttatcacgactgatctcaagaagtactgccttaattggagatatgagaccatcagcttgtttgcacagaggctaaatgagatttacggattgccctcatttttccagtggctgcataagaggcttgagacctctgtcctgtatgtaagtgaccctcattgcccccccgaccttgacgcccatatcccgttatataaagtccccaatgatcaaatcttcattaagtaccctatgggaggtatagaagggtattgtcagaagctgtggaccatcagcaccattccctatctatacctggctgcttatgagagcggagtaaggattgcttcgttagtgcaaggggacaatcagaccatagccgtaacaaaaagggtacccagcacatggccctacaaccttaagaaacgggaagctgctagagtaactagagattactttgtaattcttaggcaaaggctacatgatattggccatcacctcaaggcaaatgagacaattgtttcatcacatttttttgtctattcaaaaggaatatattatgatgggctacttgtgtcccaatcactcaagagcatcgcaagatgtgtattctggtcagagactatagttgatgaaacaagggcagcatgcagtaatattgctacaacaatggctaaaagcatcgagagaggttatgaccgttaccttgcatattccctgaacgtcctaaaagtgatacagcaaattctgatctctcttggcttcacaatcaattcaaccatgacccgggatgtagtcatacccctcctcacaaacaacgacctcttaataaggatggcactgttgcccgctcctattggggggatgaattatctgaatatgagcaggctgtttgtcagaaacatcggtgatccagtaacatcatcaattgctgatctcaagagaatgattctcgcctcactaatgcctgaagagaccctccatcaagtaatgacacaacaaccgggggactcttcattcctagactgggctagcgacccttactcagcaaatcttgtatgtgtccagagcatcactagactcctcaagaacataactgcaaggtttgtcctgatccatagtccaaacccaatgttaaaaggattattccatgatgacagtaaagaagaggacgagggactggcggcattcctcatggacaggcatattatagtacctagggcagctcatgaaatcctggatcatagtgtcacaggggcaagagagtctattgcaggcatgctggataccacaaaaggcttgattcgagccagcatgaggaagggggggttaacctctcgagtgataaccagattgtccaattatgactatgaacaattcagagcagggatggtgctattgacaggaagaaagagaaatgtcctcattgacaaagagtcatgttcagtgcagctggcgagagctctaagaagccatatgtgggcgaggctagctcgaggacggcctatttacggccttgaggtccctgatgtactagaatctatgcgaggccaccttattcggcgtcatgagacatgtgtcatctgcgagtgtggatcagtcaactacggatggttttttgtcccctcgggttgccaactggatgatattgacaaggaaacatcatccttgagagtcccatatattggttctaccactgatgagagaacagacatgaagcttgccttcgtaagagccccaagtcgatccttgcgatctgctgttagaatagcaacagtgtactcatgggcttacggtgatgatgatagctcttggaacgaagcctggttgttggctaggcaaagggccaatgtgagcctggaggagctaagggtgatcactcccatctcaacttcgactaatttagcgcataggttgagggatcgtagcactcaagtgaaatactcaggtacatcccttgtccgagtggcgaggtataccacaatctccaacgacaatctctcatttgtcatatcagataagaaggttgatactaactttatataccaacaaggaatgcttctagggttgggtgttttagaaacattgtttcgactcgagaaagataccggatcatctaacacggtattacatcttcacgtcgaaacagattgttgcgtgatcccgatgatagatcatcccaggatacccagctcccgcaagctagagctgagggcagagctatgtaccaacccattgatatatgataatgcacctttaattgacagagatgcaacaaggctatacacccagagccataggaggcaccttgtggaatttgttacatggtccacaccccaactatatcacattttagctaagtccacagcactatctatgattgacctggtaacaaaatttgagaaggaccatatgaatgaaatttcagctctcataggggatgacgatatcaatagtttcataactgagtttctgctcatagagccaagattattcactatctacttgggccagtgtgcggccatcaattgggcatttgatgtacattatcatagaccatcagggaaatatcagatgggtgagctgttgtcatcgttcctttctagaatgagcaaaggagtgtttaaggtgcttgtcaatgctctaagccacccaaagatctacaagaaattctggcattgtggtattatagagcctatccatggtccttcacttgatgctcaaaacttgcacacaactgtgtgcaacatggtttacacatgctatatgacctacctcgacctgttgttgaatgaagagttagaagagttcacatttctcttgtgtgaaagcgacgaggatgtagtaccggacagattcgacaacatccaggcaaaacacttatgtgttctggcagatttgtactgtcaaccagggacctgcccaccaattcgaggtctaagaccggtagagaaatgtgcagttctaaccgaccatatcaaggcagaggctatgttatctccagcaggatcttcgtggaacataaatccaattattgtagaccattactcatgctctctgacttatctccggcgaggatcgatcaaacagataagattgagagttgatccaggattcattttcgacgccctcgctgaggtaaatgtcagtcagccaaagatcggcagcaacaacatctcaaatatgagcatcaaggctttcagacccccacacgatgatgttgcaaaattgctcaaagatatcaacacaagcaagcacaatcttcccatttcagggggcaatctcgccaattatgaaatccatgctttccgcagaatcgggttgaactcatctgcttgctacaaagctgttgagatatcaacattaattaggagatgccttgagccaggggaggacggcttgttcttgggtgagggatcgggttctatgttgatcacttataaagagatacttaaactaaacaagtgcttctataatagtggggtttccgccaattctagatctggtcaaagggaattagcaccctatccctccgaagttggccttgtcgaacacagaatgggagtaggtaatattgtcaaagtgctctttaacgggaggcccgaagtcacgtgggtaggcagtgtagattgcttcaatttcatagttagtaatatccctacctctagtgtggggtttatccattcagatatagagaccttgcctgacaaagatactatagagaagctagaggaattggcagccatcttatcgatggctctgctcctgggcaaaataggatcaatactggtgattaagcttatgcctttcagcggggattttgttcagggatttataagttatgtagggtctcattatagagaagtgaaccttgtataccctagatacagcaacttcatctctactgaatcttatttggttatgacagatctcaaggctaaccggctaatgaatcctgaaaagattaagcagcagataattgaatcatctgtgaggacttcacctggacttataggtcacatcctatccattaagcaactaagctgcatacaagcaattgtgggagacgcagttagtagaggtgatatcaatcctactctgaaaaaacttacacctatagagcaggtgctgatcaattgcgggttggcaattaacggacctaagctgtgcaaagaattgatccaccatgatgttgcctcagggcaagatggattgcttaattctatactcatcctctacagggagttggcaagattcaaagacaaccaaagaagtcaacaagggatgttccacgcttaccccgtattggtaagtagcaggcaacgagaacttatatctaggatcacccgcaaattctgggggcacattcttctttactccgggaacaaaaagttgataaataagtttatccagaatctcaagtccggctatctgatactagacttacaccagaatatcttcgttaagaatctatccaagtcagagaaacagattattatgacggggggtttgaaacgtgagtgggtttttaaggtaacagtcaaggagaccaaagaatggtataagttagtcggatacagtgccctgattaaggactaattggttgaactccggaaccctaatcctgccctaggtggttaggcattatttgcaatatattaaagaaaactttgaaaatacgaagtttctattcccagctttgtctggtggccggcatggtcccagcctcctcgctggcgccggctgggcaacattccgaggggaccgtcccctcggtaatggcgaatgggacgcggccgatccggctgctaacaaagcccgaaaggaagctgagttggctgctgccaccgctgagcaataactagcataaccccttggggcctctaaacgggtcttgaggggttttttgctgaaaggaggaactatatccggatgcggccgcgggccctatggtacccagcttttgttccctttagtgagggttaattccgagcttggcgtaatcatggtcatagctgtttcctgtgtgaaattgttatccgctcacaattccacacaacataggagccggaagcataaagtgtaaagcctggggtgcctaatgagtgaggtaactcacattaattgcgttgcgctcactgcccgctttccagtcgggaaacctgtcgtgccagctgcattaatgaatcggccaacgcgcggggagaggcggtttgcgtattgggcgctcttccgcttcctcgctcactgactcgctgcgctcggtcgttcggctgcggcgagcggtatcagctcactcaaaggcggtaatacggttatccacagaatcaggggataacgcaggaaagaacatgtgagcaaaaggccagcaaaaggccaggaaccgtaaaaaggccgcgttgctggcgtttttccataggctcggcccccctgacgagcatcacaaaaatcgacgctcaagtcagaggtggcgaaacccgacaggactataaagataccaggcgttcccccctggaagctccctcgtgcgctctcctgttccgaccctgccgcttaccggatacctgtccgcctttctcccttcgggaagcgtggcgctttctcaatgctcacgctgtaggtatctcagttcggtgtaggtcgttcgctccaagctgggctgtgtgcacgaaccccccgttcagcccgaccgctgcgccttatccggtaactatcgtcttgagtccaacccggtaagacacgacttatcgccactggcagcagccactggtaacaggattagcagagcgaggtatgtaggcggtgctacagagttcttgaagtggtggcctaactacggctacactagaaggacagtatttggtatctgcgctctgctgaagccagttaccttcggaaaaagagttggtagctcttgatccggcaaacaaaccaccgctggtagcggtggtttttttgtttgcaagcagcagattacgcgcagaaaaaaaggatctcaagaagatcctttgatcttttctacggggtctgacgctcagtggaacgaaaactcacgttaagggattttggtcatgagattatcaaaaaggatcttcacctagatccttttaaattaaaaatgaagttttaaatcaatctaaagtatatatgagtaaacttggtctgacagttaccaatgcttaatcagtgaggcacctatctcagcgatctgtctatttcgttcatccatagttgcctgactgcccgtcgtgtagataactacgatacgggagggcttaccatctggccccagtgctgcaatgataccgcgagacccacgctcaccggctccagatttatcagcaataaaccagccagccggaagggccgagcgcagaagtggtcctgcaactttatccgcctccatccagtctattaattgttgccgggaagctagagtaagtagttcgccagttaatagtttgcgcaacgttgttgccattgctacaggcatcgtggtgtcacgctcgtcgtttggtatggcttcattcagctccggttcccaacgatcaaggcgagttacatgatcccccatgttgtgaaaaaaagcggttagctccttcggtcctccgatcgttgtcagaagtaagttggccgcagtgttatcactcatgcttatggcagcactgcataattctcttactgtcatgccatccgtaagatgcttttctgtgactggtgagtactcaaccaagtcattctgagaatagtgtatgcggcgaccgagttgctcttgcccggcgtcaatacgggataataccgcgccacatagcagaactttaaaagtgctcatcattggaaaacgttcttcggggcgaaaactctcaaggatcttaccgctgttgagatccagttcgatgtaacccactcgtgcacccaactgatcttcagcatcttttactttcaccagcgtttctgggtgagcaaaaacaggaaggcaaaatgccgcaaaaaagggaataagggcgacacggaaatgttgaatactcatactcttcctttttcaatattattgaagcatttatcagggttattgtctcatgagcggatacatatttgaatgtatttagaaaaataaacaaataggggttccgcgcacatttccccgaaaagtgccacctgaaattgtaaacgttaatattttgttaaaattcgcgttaaatttttgttaaatcagctcattttttaaccaataggccgaaatcggcaaaatcccttataaatcaaaagaatagaccgagatagggttgagtgttgttccagtttggaacaagagtccactattaaagaacgtggactccaacgtcaaagggcgaaaaaccgtctatcagggcgatggcccactacgtgaaccatcaccctaatcaagttttttggggtcgaggtgccgtaaagcactaaatcggaaccctaaagggagcccccgatttagagcttgacggggaaagccggcgaacgtggcgagaaaggaagggaagaaagcgaaaggagcgggcgctagggcgctggcaagtgtagcggtcacgctgcgcgtaaccaccacacccgccgcgcttaatgcgccgctacagggcgcgtcccattcgccattcaggctgcgcaactgttgggaagggcgatcggtgcgggcctcttcgctattacgccagccaccgcggtg

SEQ ID NO: 29 - DNA, 19795 bp, Artificial sequence
  pTM2-MVSchw-gfp
gcggccgctaatacgactcactatagggccaactttgtttggtctgatgagtccgtgaggacgaaacccggagtcccgggtcaccaaacaaagttgggtaaggatagttcaatcaatgatcatcttctagtgcacttaggattcaagatcctattatcagggacaagagcaggattagggatatccgagatggccacacttttaaggagcttagcattgttcaaaagaaacaaggacaaaccacccattacatcaggatccggtggagccatcagaggaatcaaacacattattatagtaccaatccctggagattcctcaattaccactcgatccagacttctggaccggttggtgaggttaattggaaacccggatgtgagcgggcccaaactaacaggggcactaataggtatattatccttatttgtggagtctccaggtcaattgattcagaggatcaccgatgaccctgacgttagcataaggctgttagaggttgtccagagtgaccagtcacaatctggccttaccttcgcatcaagaggtaccaacatggaggatgaggcggaccaatacttttcacatgatgatccaattagtagtgatcaatccaggttcggatggttcgggaacaaggaaatctcagatattgaagtgcaagaccctgagggattcaacatgattctgggtaccatcctagcccaaatttgggtcttgctcgcaaaggcggttacggccccagacacggcagctgattcggagctaagaaggtggataaagtacacccaacaaagaagggtagttggtgaatttagattggagagaaaatggttggatgtggtgaggaacaggattgccgaggacctctccttacgccgattcatggtcgctctaatcctggatatcaagagaacacccggaaacaaacccaggattgctgaaatgatatgtgacattgatacatatatcgtagaggcaggattagccagttttatcctgactattaagtttgggatagaaactatgtatcctgctcttggactgcatgaatttgctggtgagttatccacacttgagtccttgatgaacctttaccagcaaatgggggaaactgcaccctacatggtaatcctggagaactcaattcagaacaagttcagtgcaggatcataccctctgctctggagctatgccatgggagtaggagtggaacttgaaaactccatgggaggtttgaactttggccgatcttactttgatccagcatattttagattagggcaagagatggtaaggaggtcagctggaaaggtcagttccacattggcatctgaactcggtatcactgccgaggatgcaaggcttgtttcagagattgcaatgcatactactgaggacaagatcagtagagcggttggacccagacaagcccaagtatcatttctacacggtgatcaaagtgagaatgagctaccgagattggggggcaaggaagataggagggtcaaacagagtcgaggagaagccagggagagctacagagaaaccgggcccagcagagcaagtgatgcgagagctgcccatcttccaaccggcacacccctagacattgacactgcaacggagtccagccaagatccgcaggacagtcgaaggtcagctgacgccctgcttaggctgcaagccatggcaggaatctcggaagaacaaggctcagacacggacacccctatagtgtacaatgacagaaatcttctagactaggtgcgagaggccgagggccagaacaacatccgcctaccatccatcattgttataaaaaacttaggaaccaggtccacacagccgccagcccatcaaccatccactcccacgattggagccaatggcagaagagcaggcacgccatgtcaaaaacggactggaatgcatccgggctctcaaggccgagcccatcggctcactggccatcgaggaagctatggcagcatggtcagaaatatcagacaacccaggacaggagcgagccacctgcagggaagagaaggcaggcagttcgggtctcagcaaaccatgcctctcagcaattggatcaactgaaggcggtgcacctcgcatccgcggtcagggacctggagagagcgatgacgacgctgaaactttgggaatccccccaagaaatctccaggcatcaagcactgggttacagtgttattacgtttatgatcacagcggtgaagcggttaagggaatccaagatgctgactctatcatggttcaatcaggccttgatggtgatagcaccctctcaggaggagacaatgaatctgaaaacagcgatgtggatattggcgaacctgataccgagggatatgctatcactgaccggggatctgctcccatctctatggggttcagggcttctgatgttgaaactgcagaaggaggggagatccacgagctcctgagactccaatccagaggcaacaactttccgaagcttgggaaaactctcaatgttcctccgcccccggaccccggtagggccagcacttccgggacacccattaaaaagggcacagacgcgagattagcctcatttggaacggagatcgcgtctttattgacaggtggtgcaacccaatgtgctcgaaagtcaccctcggaaccatcagggccaggtgcacctgcggggaatgtccccgagtgtgtgagcaatgccgcactgatacaggagtggacacccgaatctggtaccacaatctccccgagatcccagaataatgaagaagggggagactattatgatgatgagctgttctctgatgtccaagatattaaaacagccttggccaaaatacacgaggataatcagaagataatctccaagctagaatcactgctgttattgaagggagaagttgagtcaattaagaagcagatcaacaggcaaaatatcagcatatccaccctggaaggacacctctcaagcatcatgatcgccattcctggacttgggaaggatcccaacgaccccactgcagatgtcgaaatcaatcccgacttgaaacccatcataggcagagattcaggccgagcactggccgaagttctcaagaaacccgttgccagccgacaactccaaggaatgacaaatggacggaccagttccagaggacagctgctgaaggaatttcagctaaagccgatcgggaaaaagatgagctcagccgtcgggtttgttcctgacaccggccctgcatcacgcagtgtaatccgctccattataaaatccagccggctagaggaggatcggaagcgttacctgatgactctccttgatgatatcaaaggagccaatgatcttgccaagttccaccagatgctgatgaagataataatgaagtagctacagctcaacttacctgccaaccccatgccagtcgacccaactagcctaccctccatcattgttataaaaaacttaggaaccaggtccacacagccgccagcccatcaacgcgtacgatggtgagcaagggcgaggagctgttcaccggggtggtgcccatcctggtcgagctggacggcgacgtaaacggccacaagttcagcgtgtccggcgagggcgagggcgatgccacctacggcaagctgaccctgaagttcatctgcaccaccggcaagctgcccgtgccctggcccaccctcgtgaccaccctgacctacggcgtgcagtgcttcagccgctaccccgaccacatgaagcagcacgacttcttcaagtccgccatgcccgaaggctacgtccaggagcgcaccatcttcttcaaggacgacggcaactacaagacccgcgccgaggtgaagttcgagggcgacaccctggtgaaccgcatcgagctgaagggcatcgacttcaaggaggacggcaacatcctggggcacaagctggagtacaactacaacagccacaacgtctatatcatggccgacaagcagaagaacggcatcaaggtgaacttcaagatccgccacaacatcgaggacggcagcgtgcagctcgccgaccactaccagcagaacacccccatcggcgacggccccgtgctgctgcccgacaaccactacctgagcacccagtccgccctgagcaaagaccccaacgagaagcgcgatcacatggtcctgctggagttcgtgaccgccgccgggatcactctcggcatggacgagctgtacaagtaggcgcgcagcgcttagacgtctcgcgatcgatactagtacaacctaaatccattataaaaaacttaggagcaaagtgattgcctcccaaggtccacaatgacagagacctacgacttcgacaagtcggcatgggacatcaaagggtcgatcgctccgatacaacccaccacctacagtgatggcaggctggtgccccaggtcagagtcatagatcctggtctaggcgacaggaaggatgaatgctttatgtacatgtttctgctgggggttgttgaggacagcgattccctagggcctccaatcgggcgagcatttgggttcctgcccttaggtgttggcagatccacagcaaagcccgaaaaactcctcaaagaggccactgagcttgacatagttgttagacgtacagcagggctcaatgaaaaactggtgttctacaacaacaccccactaactctcctcacaccttggagaaaggtcctaacaacagggagtgtcttcaacgcaaaccaagtgtgcaatgcggttaatctgataccgctcgataccccgcagaggttccgtgttgtttatatgagcatcacccgtctttcggataacgggtattacaccgttcctagaagaatgctggaattcagatcggtcaatgcagtggccttcaacctgctggtgacccttaggattgacaaggcgataggccctgggaagatcatcgacaatacagagcaacttcctgaggcaacatttatggtccacatcgggaacttcaggagaaagaagagtgaagtctactctgccgattattgcaaaatgaaaatcgaaaagatgggcctggtttttgcacttggtgggatagggggcaccagtcttcacattagaagcacaggcaaaatgagcaagactctccatgcacaactcgggttcaagaagaccttatgttacccgctgatggatatcaatgaagaccttaatcgattactctggaggagcagatgcaagatagtaagaatccaggcagttttgcagccatcagttcctcaagaattccgcatttacgacgacgtgatcataaatgatgaccaaggactattcaaagttctgtagaccgtagtgcccagcaatgcccgaaaacgacccccctcacaatgacagccagaaggcccggacaaaaaagccccctccgaaagactccacggaccaagcgagaggccagccagcagccgacggcaagcgcgaacaccaggcggccccagcacagaacagccctgacacaaggccaccaccagccaccccaatctgcatcctcctcgtgggacccccgaggaccaacccccaaggctgcccccgatccaaaccaccaaccgcatccccaccacccccgggaaagaaacccccagcaattggaaggcccctccccctcttcctcaacacaagaactccacaaccgaaccgcacaagcgaccgaggtgacccaaccgcaggcatccgactccctagacagatcctctctccccggcaaactaaacaaaacttagggccaaggaacatacacacccaacagaacccagaccccggcccacggcgccgcgcccccaacccccgacaaccagagggagcccccaaccaatcccgccggctcccccggtgcccacaggcagggacaccaacccccgaacagacccagcacccaaccatcgacaatccaagacgggggggcccccccaaaaaaaggcccccaggggccgacagccagcaccgcgaggaagcccacccaccccacacacgaccacggcaaccaaaccagaacccagaccaccctgggccaccagctcccagactcggccatcaccccgcagaaaggaaaggccacaacccgcgcaccccagccccgatccggcggggagccacccaacccgaaccagcacccaagagcgatccccgaaggacccccgaaccgcaaaggacatcagtatcccacagcctctccaagtcccccggtctcctcctcttctcgaagggaccaaaagatcaatccaccacacccgacgacactcaactccccacccctaaaggagacaccgggaatcccagaatcaagactcatccaatgtccatcatgggtctcaaggtgaacgtctctgccatattcatggcagtactgttaactctccaaacacccaccggtcaaatccattggggcaatctctctaagataggggtggtaggaataggaagtgcaagctacaaagttatgactcgttccagccatcaatcattagtcataaaattaatgcccaatataactctcctcaataactgcacgagggtagagattgcagaatacaggagactactgagaacagttttggaaccaattagagatgcacttaatgcaatgacccagaatataagaccggttcagagtgtagcttcaagtaggagacacaagagatttgcgggagtagtcctggcaggtgcggccctaggcgttgccacagctgctcagataacagccggcattgcacttcaccagtccatgctgaactctcaagccatcgacaatctgagagcgagcctggaaactactaatcaggcaattgagacaatcagacaagcagggcaggagatgatattggctgttcagggtgtccaagactacatcaataatgagctgataccgtctatgaaccaactatcttgtgatttaatcggccagaagctcgggctcaaattgctcagatactatacagaaatcctgtcattatttggccccagtttacgggaccccatatctgcggagatatctatccaggctttgagctatgcgcttggaggagacatcaataaggtgttagaaaagctcggatacagtggaggtgatttactgggcatcttagagagcggaggaataaaggcccggataactcacgtcgacacagagtcctacttcattgtcctcagtatagcctatccgacgctgtccgagattaagggggtgattgtccaccggctagagggggtctcgtacaacataggctctcaagagtggtataccactgtgcccaagtatgttgcaacccaagggtaccttatctcgaattttgatgagtcatcgtgtactttcatgccagaggggactgtgtgcagccaaaatgccttgtacccgatgagtcctctgctccaagaatgcctccgggggtacaccaagtcctgtgctcgtacactcgtatccgggtcttttgggaaccggttcattttatcacaagggaacctaatagccaattgtgcatcaatcctttgcaagtgttacacaacaggaacgatcattaatcaagaccctgacaagatcctaacatacattgctgccgatcactgcccggtagtcgaggtgaacggcgtgaccatccaagtcgggagcaggaggtatccagacgctgtgtacttgcacagaattgacctcggtcctcccatatcattggagaggttggacgtagggacaaatctggggaatgcaattgctaagttggaggatgccaaggaattgttggagtcatcggaccagatattgaggagtatgaaaggtttatcgagcactagcatagtctacatcctgattgcagtgtgtcttggagggttgatagggatccccgctttaatatgttgctgcagggggcgttgtaacaaaaagggagaacaagttggtatgtcaagaccaggcctaaagcctgatcttacgggaacatcaaaatcctatgtaaggtcgctctgatcctctacaactcttgaaacacaaatgtcccacaagtctcctcttcgtcatcaagcaaccaccgcacccagcatcaagcccacctgaaattatctccggcttccctctggccgaacaatatcggtagttaatcaaaacttagggtgcaagatcatccacaatgtcaccacaacgagaccggataaatgccttctacaaagataacccccatcccaagggaagtaggatagtcattaacagagaacatcttatgattgatagaccttatgttttgctggctgttctgtttgtcatgtttctgagcttgatcgggttgctagccattgcaggcattagacttcatcgggcagccatctacaccgcagagatccataaaagcctcagcaccaatctagatgtaactaactcaatcgagcatcaggtcaaggacgtgctgacaccactcttcaaaatcatcggtgatgaagtgggcctgaggacacctcagagattcactgacctagtgaaattaatctctgacaagattaaattccttaatccggatagggagtacgacttcagagatctcacttggtgtatcaacccgccagagagaatcaaattggattatgatcaatactgtgcagatgtggctgctgaagagctcatgaatgcattggtgaactcaactctactggagaccagaacaaccaatcagttcctagctgtctcaaagggaaactgctcagggcccactacaatcagaggtcaattctcaaacatgtcgctgtccctgttagacttgtatttaggtcgaggttacaatgtgtcatctatagtcactatgacatcccagggaatgtatgggggaacttacctagtggaaaagcctaatctgagcagcaaaaggtcagagttgtcacaactgagcatgtaccgagtgtttgaagtaggtgttatcagaaatccgggtttgggggctccggtgttccatatgacaaactatcttgagcaaccagtcagtaatgatctcagcaactgtatggtggctttgggggagctcaaactcgcagccctttgtcacggggaagattctatcacaattccctatcagggatcagggaaaggtgtcagcttccagctcgtcaagctaggtgtctggaaatccccaaccgacatgcaatcctgggtccccttatcaacggatgatccagtgatagacaggctttacctctcatctcacagaggtgttatcgctgacaatcaagcaaaatgggctgtcccgacaacacgaacagatgacaagttgcgaatggagacatgcttccaacaggcgtgtaagggtaaaatccaagcactctgcgagaatcccgagtgggcaccattgaaggataacaggattccttcatacggggtcttgtctgttgatctgagtctgacagttgagcttaaaatcaaaattgcttcgggattcgggccattgatcacacacggttcagggatggacctatacaaatccaaccacaacaatgtgtattggctgactatcccgccaatgaagaacctagccttaggtgtaatcaacacattggagtggataccgagattcaaggttagtccctacctcttcactgtcccaattaaggaagcaggcgaagactgccatgccccaacatacctacctgcggaggtggatggtgatgtcaaactcagttccaatctggtgattctacctggtcaagatctccaatatgttttggcaacctacgatacttccagggttgaacatgctgtggtttattacgtttacagcccaagccgctcattttcttacttttatccttttaggttgcctataaagggggtccccatcgaattacaagtggaatgcttcacatgggaccaaaaactctggtgccgtcacttctgtgtgcttgcggactcagaatctggtggacatatcactcactctgggatggtgggcatgggagtcagctgcacagtcacccgggaagatggaaccaatcgcagatagggctgctagtgaaccaatcacatgatgtcacccagacatcaggcatacccactagtgtgaaatagacatcagaattaagaaaaacgtagggtccaagtggttccccgttatggactcgctatctgtcaaccagatcttataccctgaagttcacctagatagcccgatagttaccaataagatagtagccatcctggagtatgctcgagtccctcacgcttacagcctggaggaccctacactgtgtcagaacatcaagcaccgcctaaaaaacggattttccaaccaaatgattataaacaatgtggaagttgggaatgtcatcaagtccaagcttaggagttatccggcccactctcatattccatatccaaattgtaatcaggatttatttaacatagaagacaaagagtcaacgaggaagatccgtgaactcctcaaaaaggggaattcgctgtactccaaagtcagtgataaggttttccaatgcttaagggacactaactcacggcttggcctaggctccgaattgagggaggacatcaaggagaaagttattaacttgggagtttacatgcacagctcccagtggtttgagccctttctgttttggtttacagtcaagactgagatgaggtcagtgattaaatcacaaacccatacttgccataggaggagacacacacctgtattcttcactggtagttcagttgagttgctaatctctcgtgaccttgttgctataatcagtaaagagtctcaacatgtatattacctgacatttgaactggttttgatgtattgtgatgtcatagaggggaggttaatgacagagaccgctatgactattgatgctaggtatacagagcttctaggaagagtcagatacatgtggaaactgatagatggtttcttccctgcactcgggaatccaacttatcaaattgtagccatgctggagcctctttcacttgcttacctgcagctgagggatataacagtagaactcagaggtgctttccttaaccactgctttactgaaatacatgatgttcttgaccaaaacgggttttctgatgaaggtacttatcatgagttaactgaagctctagattacattttcataactgatgacatacatctgacaggggagattttctcatttttcagaagtttcggccaccccagacttgaagcagtaacggctgctgaaaatgttaggaaatacatgaatcagcctaaagtcattgtgtatgagactctgatgaaaggtcatgccatattttgtggaatcataatcaacggctatcgtgacaggcacggaggcagttggccaccgctgaccctccccctgcatgctgcagacacaatccggaatgctcaagcttcaggtgaagggttaacacatgagcagtgcgttgataactggaaatcttttgctggagtgaaatttggctgctttatgcctcttagcctggatagtgatctgacaatgtacctaaaggacaaggcacttgctgctctccaaagggaatgggattcagtttacccgaaagagttcctgcgttacgaccctcccaagggaaccgggtcacggaggcttgtagatgttttccttaatgattcgagctttgacccatatgatgtgataatgtatgttgtaagtggagcttacctccatgaccctgagttcaacctgtcttacagcctgaaagaaaaggagatcaaggaaacaggtagactttttgctaaaatgacttacaaaatgagggcatgccaagtgattgctgaaaatctaatctcaaacgggattggcaaatattttaaggacaatgggatggccaaggatgagcacgatttgactaaggcactccacactctagctgtctcaggagtccccaaagatctcaaagaaagtcacaggggggggccagtcttaaaaacctactcccgaagcccagtccacacaagtaccaggaacgtgagagcagcaaaagggtttatagggttccctcaagtaattcggcaggaccaagacactgatcatccggagaatatggaagcttacgagacagtcagtgcatttatcacgactgatctcaagaagtactgccttaattggagatatgagaccatcagcttgtttgcacagaggctaaatgagatttacggattgccctcatttttccagtggctgcataagaggcttgagacctctgtcctgtatgtaagtgaccctcattgcccccccgaccttgacgcccatatcccgttatataaagtccccaatgatcaaatcttcattaagtaccctatgggaggtatagaagggtattgtcagaagctgtggaccatcagcaccattccctatctatacctggctgcttatgagagcggagtaaggattgcttcgttagtgcaaggggacaatcagaccatagccgtaacaaaaagggtacccagcacatggccctacaaccttaagaaacgggaagctgctagagtaactagagattactttgtaattcttaggcaaaggctacatgatattggccatcacctcaaggcaaatgagacaattgtttcatcacatttttttgtctattcaaaaggaatatattatgatgggctacttgtgtcccaatcactcaagagcatcgcaagatgtgtattctggtcagagactatagttgatgaaacaagggcagcatgcagtaatattgctacaacaatggctaaaagcatcgagagaggttatgaccgttaccttgcatattccctgaacgtcctaaaagtgatacagcaaattctgatctctcttggcttcacaatcaattcaaccatgacccgggatgtagtcatacccctcctcacaaacaacgacctcttaataaggatggcactgttgcccgctcctattggggggatgaattatctgaatatgagcaggctgtttgtcagaaacatcggtgatccagtaacatcatcaattgctgatctcaagagaatgattctcgcctcactaatgcctgaagagaccctccatcaagtaatgacacaacaaccgggggactcttcattcctagactgggctagcgacccttactcagcaaatcttgtatgtgtccagagcatcactagactcctcaagaacataactgcaaggtttgtcctgatccatagtccaaacccaatgttaaaaggattattccatgatgacagtaaagaagaggacgagggactggcggcattcctcatggacaggcatattatagtacctagggcagctcatgaaatcctggatcatagtgtcacaggggcaagagagtctattgcaggcatgctggataccacaaaaggcttgattcgagccagcatgaggaagggggggttaacctctcgagtgataaccagattgtccaattatgactatgaacaattcagagcagggatggtgctattgacaggaagaaagagaaatgtcctcattgacaaagagtcatgttcagtgcagctggcgagagctctaagaagccatatgtgggcgaggctagctcgaggacggcctatttacggccttgaggtccctgatgtactagaatctatgcgaggccaccttattcggcgtcatgagacatgtgtcatctgcgagtgtggatcagtcaactacggatggttttttgtcccctcgggttgccaactggatgatattgacaaggaaacatcatccttgagagtcccatatattggttctaccactgatgagagaacagacatgaagcttgccttcgtaagagccccaagtcgatccttgcgatctgctgttagaatagcaacagtgtactcatgggcttacggtgatgatgatagctcttggaacgaagcctggttgttggctaggcaaagggccaatgtgagcctggaggagctaagggtgatcactcccatctcaacttcgactaatttagcgcataggttgagggatcgtagcactcaagtgaaatactcaggtacatcccttgtccgagtggcgaggtataccacaatctccaacgacaatctctcatttgtcatatcagataagaaggttgatactaactttatataccaacaaggaatgcttctagggttgggtgttttagaaacattgtttcgactcgagaaagataccggatcatctaacacggtattacatcttcacgtcgaaacagattgttgcgtgatcccgatgatagatcatcccaggatacccagctcccgcaagctagagctgagggcagagctatgtaccaacccattgatatatgataatgcacctttaattgacagagatgcaacaaggctatacacccagagccataggaggcaccttgtggaatttgttacatggtccacaccccaactatatcacattttagctaagtccacagcactatctatgattgacctggtaacaaaatttgagaaggaccatatgaatgaaatttcagctctcataggggatgacgatatcaatagtttcataactgagtttctgctcatagagccaagattattcactatctacttgggccagtgtgcggccatcaattgggcatttgatgtacattatcatagaccatcagggaaatatcagatgggtgagctgttgtcatcgttcctttctagaatgagcaaaggagtgtttaaggtgcttgtcaatgctctaagccacccaaagatctacaagaaattctggcattgtggtattatagagcctatccatggtccttcacttgatgctcaaaacttgcacacaactgtgtgcaacatggtttacacatgctatatgacctacctcgacctgttgttgaatgaagagttagaagagttcacatttctcttgtgtgaaagcgacgaggatgtagtaccggacagattcgacaacatccaggcaaaacacttatgtgttctggcagatttgtactgtcaaccagggacctgcccaccaattcgaggtctaagaccggtagagaaatgtgcagttctaaccgaccatatcaaggcagaggctatgttatctccagcaggatcttcgtggaacataaatccaattattgtagaccattactcatgctctctgacttatctccggcgaggatcgatcaaacagataagattgagagttgatccaggattcattttcgacgccctcgctgaggtaaatgtcagtcagccaaagatcggcagcaacaacatctcaaatatgagcatcaaggctttcagacccccacacgatgatgttgcaaaattgctcaaagatatcaacacaagcaagcacaatcttcccatttcagggggcaatctcgccaattatgaaatccatgctttccgcagaatcgggttgaactcatctgcttgctacaaagctgttgagatatcaacattaattaggagatgccttgagccaggggaggacggcttgttcttgggtgagggatcgggttctatgttgatcacttataaagagatacttaaactaaacaagtgcttctataatagtggggtttccgccaattctagatctggtcaaagggaattagcaccctatccctccgaagttggccttgtcgaacacagaatgggagtaggtaatattgtcaaagtgctctttaacgggaggcccgaagtcacgtgggtaggcagtgtagattgcttcaatttcatagttagtaatatccctacctctagtgtggggtttatccattcagatatagagaccttgcctgacaaagatactatagagaagctagaggaattggcagccatcttatcgatggctctgctcctgggcaaaataggatcaatactggtgattaagcttatgcctttcagcggggattttgttcagggatttataagttatgtagggtctcattatagagaagtgaaccttgtataccctagatacagcaacttcatctctactgaatcttatttggttatgacagatctcaaggctaaccggctaatgaatcctgaaaagattaagcagcagataattgaatcatctgtgaggacttcacctggacttataggtcacatcctatccattaagcaactaagctgcatacaagcaattgtgggagacgcagttagtagaggtgatatcaatcctactctgaaaaaacttacacctatagagcaggtgctgatcaattgcgggttggcaattaacggacctaagctgtgcaaagaattgatccaccatgatgttgcctcagggcaagatggattgcttaattctatactcatcctctacagggagttggcaagattcaaagacaaccaaagaagtcaacaagggatgttccacgcttaccccgtattggtaagtagcaggcaacgagaacttatatctaggatcacccgcaaattctgggggcacattcttctttactccgggaacaaaaagttgataaataagtttatccagaatctcaagtccggctatctgatactagacttacaccagaatatcttcgttaagaatctatccaagtcagagaaacagattattatgacggggggtttgaaacgtgagtgggtttttaaggtaacagtcaaggagaccaaagaatggtataagttagtcggatacagtgccctgattaaggactaattggttgaactccggaaccctaatcctgccctaggtggttaggcattatttgcaatatattaaagaaaactttgaaaatacgaagtttctattcccagctttgtctggtggccggcatggtcccagcctcctcgctggcgccggctgggcaacattccgaggggaccgtcccctcggtaatggcgaatgggacgcggccgatccggctgctaacaaagcccgaaaggaagctgagttggctgctgccaccgctgagcaataactagcataaccccttggggcctctaaacgggtcttgaggggttttttgctgaaaggaggaactatatccggatgcggccgcgggccctatggtacccagcttttgttccctttagtgagggttaattccgagcttggcgtaatcatggtcatagctgtttcctgtgtgaaattgttatccgctcacaattccacacaacataggagccggaagcataaagtgtaaagcctggggtgcctaatgagtgaggtaactcacattaattgcgttgcgctcactgcccgctttccagtcgggaaacctgtcgtgccagctgcattaatgaatcggccaacgcgcggggagaggcggtttgcgtattgggcgctcttccgcttcctcgctcactgactcgctgcgctcggtcgttcggctgcggcgagcggtatcagctcactcaaaggcggtaatacggttatccacagaatcaggggataacgcaggaaagaacatgtgagcaaaaggccagcaaaaggccaggaaccgtaaaaaggccgcgttgctggcgtttttccataggctcggcccccctgacgagcatcacaaaaatcgacgctcaagtcagaggtggcgaaacccgacaggactataaagataccaggcgttcccccctggaagctccctcgtgcgctctcctgttccgaccctgccgcttaccggatacctgtccgcctttctcccttcgggaagcgtggcgctttctcaatgctcacgctgtaggtatctcagttcggtgtaggtcgttcgctccaagctgggctgtgtgcacgaaccccccgttcagcccgaccgctgcgccttatccggtaactatcgtcttgagtccaacccggtaagacacgacttatcgccactggcagcagccactggtaacaggattagcagagcgaggtatgtaggcggtgctacagagttcttgaagtggtggcctaactacggctacactagaaggacagtatttggtatctgcgctctgctgaagccagttaccttcggaaaaagagttggtagctcttgatccggcaaacaaaccaccgctggtagcggtggtttttttgtttgcaagcagcagattacgcgcagaaaaaaaggatctcaagaagatcctttgatcttttctacggggtctgacgctcagtggaacgaaaactcacgttaagggattttggtcatgagattatcaaaaaggatcttcacctagatccttttaaattaaaaatgaagttttaaatcaatctaaagtatatatgagtaaacttggtctgacagttaccaatgcttaatcagtgaggcacctatctcagcgatctgtctatttcgttcatccatagttgcctgactgcccgtcgtgtagataactacgatacgggagggcttaccatctggccccagtgctgcaatgataccgcgagacccacgctcaccggctccagatttatcagcaataaaccagccagccggaagggccgagcgcagaagtggtcctgcaactttatccgcctccatccagtctattaattgttgccgggaagctagagtaagtagttcgccagttaatagtttgcgcaacgttgttgccattgctacaggcatcgtggtgtcacgctcgtcgtttggtatggcttcattcagctccggttcccaacgatcaaggcgagttacatgatcccccatgttgtgaaaaaaagcggttagctccttcggtcctccgatcgttgtcagaagtaagttggccgcagtgttatcactcatgcttatggcagcactgcataattctcttactgtcatgccatccgtaagatgcttttctgtgactggtgagtactcaaccaagtcattctgagaatagtgtatgcggcgaccgagttgctcttgcccggcgtcaatacgggataataccgcgccacatagcagaactttaaaagtgctcatcattggaaaacgttcttcggggcgaaaactctcaaggatcttaccgctgttgagatccagttcgatgtaacccactcgtgcacccaactgatcttcagcatcttttactttcaccagcgtttctgggtgagcaaaaacaggaaggcaaaatgccgcaaaaaagggaataagggcgacacggaaatgttgaatactcatactcttcctttttcaatattattgaagcatttatcagggttattgtctcatgagcggatacatatttgaatgtatttagaaaaataaacaaataggggttccgcgcacatttccccgaaaagtgccacctgaaattgtaaacgttaatattttgttaaaattcgcgttaaatttttgttaaatcagctcattttttaaccaataggccgaaatcggcaaaatcccttataaatcaaaagaatagaccgagatagggttgagtgttgttccagtttggaacaagagtccactattaaagaacgtggactccaacgtcaaagggcgaaaaaccgtctatcagggcgatggcccactacgtgaaccatcaccctaatcaagttttttggggtcgaggtgccgtaaagcactaaatcggaaccctaaagggagcccccgatttagagcttgacggggaaagccggcgaacgtggcgagaaaggaagggaagaaagcgaaaggagcgggcgctagggcgctggcaagtgtagcggtcacgctgcgcgtaaccaccacacccgccgcgcttaatgcgccgctacagggcgcgtcccattcgccattcaggctgcgcaactgttgggaagggcgatcggtgcgggcctcttcgctattacgccagccaccgcggtg

SEQ ID NO: 30 - DNA, 17858 bp, Artificial sequence
  pKP-MVSchw
gcgatcgctaatacgactcactatagggccaactttgtttggtctgatgagtccgtgaggacgaaacccggagtcccgggtcaccaaacaaagttgggtaaggatagttcaatcaatgatcatcttctagtgcacttaggattcaagatcctattatcagggacaagagcaggattagggatatccgagatggccacacttttaaggagcttagcattgttcaaaagaaacaaggacaaaccacccattacatcaggatccggtggagccatcagaggaatcaaacacattattatagtaccaatccctggagattcctcaattaccactcgatccagacttctggaccggttggtgaggttaattggaaacccggatgtgagcgggcccaaactaacaggggcactaataggtatattatccttatttgtggagtctccaggtcaattgattcagaggatcaccgatgaccctgacgttagcataaggctgttagaggttgtccagagtgaccagtcacaatctggccttaccttcgcatcaagaggtaccaacatggaggatgaggcggaccaatacttttcacatgatgatccaattagtagtgatcaatccaggttcggatggttcgggaacaaggaaatctcagatattgaagtgcaagaccctgagggattcaacatgattctgggtaccatcctagcccaaatttgggtcttgctcgcaaaggcggttacggccccagacacggcagctgattcggagctaagaaggtggataaagtacacccaacaaagaagggtagttggtgaatttagattggagagaaaatggttggatgtggtgaggaacaggattgccgaggacctctccttacgccgattcatggtcgctctaatcctggatatcaagagaacacccggaaacaaacccaggattgctgaaatgatatgtgacattgatacatatatcgtagaggcaggattagccagttttatcctgactattaagtttgggatagaaactatgtatcctgctcttggactgcatgaatttgctggtgagttatccacacttgagtccttgatgaacctttaccagcaaatgggggaaactgcaccctacatggtaatcctggagaactcaattcagaacaagttcagtgcaggatcataccctctgctctggagctatgccatgggagtaggagtggaacttgaaaactccatgggaggtttgaactttggccgatcttactttgatccagcatattttagattagggcaagagatggtaaggaggtcagctggaaaggtcagttccacattggcatctgaactcggtatcactgccgaggatgcaaggcttgtttcagagattgcaatgcatactactgaggacaagatcagtagagcggttggacccagacaagcccaagtatcatttctacacggtgatcaaagtgagaatgagctaccgagattggggggcaaggaagataggagggtcaaacagagtcgaggagaagccagggagagctacagagaaaccgggcccagcagagcaagtgatgcgagagctgcccatcttccaaccggcacacccctagacattgacactgcaacggagtccagccaagatccgcaggacagtcgaaggtcagctgacgccctgcttaggctgcaagccatggcaggaatctcggaagaacaaggctcagacacggacacccctatagtgtacaatgacagaaatcttctagactaggtgcgagaggccgagggccagaacaacatccgcctaccatccatcattgttataaaaaacttaggaaccaggtccacacagccgccagcccatcaaccatccactcccacgattggagccaatggcagaagagcaggcacgccatgtcaaaaacggactggaatgcatccgggctctcaaggccgagcccatcggctcactggccatcgaggaagctatggcagcatggtcagaaatatcagacaacccaggacaggagcgagccacctgcagggaagagaaggcaggcagttcgggtctcagcaaaccatgcctctcagcaattggatcaactgaaggcggtgcacctcgcatccgcggtcagggacctggagagagcgatgacgacgctgaaactttgggaatccccccaagaaatctccaggcatcaagcactgggttacagtgttattacgtttatgatcacagcggtgaagcggttaagggaatccaagatgctgactctatcatggttcaatcaggccttgatggtgatagcaccctctcaggaggagacaatgaatctgaaaacagcgatgtggatattggcgaacctgataccgagggatatgctatcactgaccggggatctgctcccatctctatggggttcagggcttctgatgttgaaactgcagaaggaggggagatccacgagctcctgagactccaatccagaggcaacaactttccgaagcttgggaaaactctcaatgttcctccgcccccggaccccggtagggccagcacttccgggacacccattaaaaagggcacagacgcgagattagcctcatttggaacggagatcgcgtctttattgacaggtggtgcaacccaatgtgctcgaaagtcaccctcggaaccatcagggccaggtgcacctgcggggaatgtccccgagtgtgtgagcaatgccgcactgatacaggagtggacacccgaatctggtaccacaatctccccgagatcccagaataatgaagaagggggagactattatgatgatgagctgttctctgatgtccaagatattaaaacagccttggccaaaatacacgaggataatcagaagataatctccaagctagaatcactgctgttattgaagggagaagttgagtcaattaagaagcagatcaacaggcaaaatatcagcatatccaccctggaaggacacctctcaagcatcatgatcgccattcctggacttgggaaggatcccaacgaccccactgcagatgtcgaaatcaatcccgacttgaaacccatcataggcagagattcaggccgagcactggccgaagttctcaagaaacccgttgccagccgacaactccaaggaatgacaaatggacggaccagttccagaggacagctgctgaaggaatttcagctaaagccgatcgggaaaaagatgagctcagccgtcgggtttgttcctgacaccggccctgcatcacgcagtgtaatccgctccattataaaatccagccggctagaggaggatcggaagcgttacctgatgactctccttgatgatatcaaaggagccaatgatcttgccaagttccaccagatgctgatgaagataataatgaagtagctacagctcaacttacctgccaaccccatgccagtcgacccaactagtacaacctaaatccattataaaaaacttaggagcaaagtgattgcctcccaaggtccacaatgacagagacctacgacttcgacaagtcggcatgggacatcaaagggtcgatcgctccgatacaacccaccacctacagtgatggcaggctggtgccccaggtcagagtcatagatcctggtctaggcgacaggaaggatgaatgctttatgtacatgtttctgctgggggttgttgaggacagcgattccctagggcctccaatcgggcgagcatttgggttcctgcccttaggtgttggcagatccacagcaaagcccgaaaaactcctcaaagaggccactgagcttgacatagttgttagacgtacagcagggctcaatgaaaaactggtgttctacaacaacaccccactaactctcctcacaccttggagaaaggtcctaacaacagggagtgtcttcaacgcaaaccaagtgtgcaatgcggttaatctgataccgctcgataccccgcagaggttccgtgttgtttatatgagcatcacccgtctttcggataacgggtattacaccgttcctagaagaatgctggaattcagatcggtcaatgcagtggccttcaacctgctggtgacccttaggattgacaaggcgataggccctgggaagatcatcgacaatacagagcaacttcctgaggcaacatttatggtccacatcgggaacttcaggagaaagaagagtgaagtctactctgccgattattgcaaaatgaaaatcgaaaagatgggcctggtttttgcacttggtgggatagggggcaccagtcttcacattagaagcacaggcaaaatgagcaagactctccatgcacaactcgggttcaagaagaccttatgttacccgctgatggatatcaatgaagaccttaatcgattactctggaggagcagatgcaagatagtaagaatccaggcagttttgcagccatcagttcctcaagaattccgcatttacgacgacgtgatcataaatgatgaccaaggactattcaaagttctgtagaccgtagtgcccagcaatgcccgaaaacgacccccctcacaatgacagccagaaggcccggacaaaaaagccccctccgaaagactccacggaccaagcgagaggccagccagcagccgacggcaagcgcgaacaccaggcggccccagcacagaacagccctgacacaaggccaccaccagccaccccaatctgcatcctcctcgtgggacccccgaggaccaacccccaaggctgcccccgatccaaaccaccaaccgcatccccaccacccccgggaaagaaacccccagcaattggaaggcccctccccctcttcctcaacacaagaactccacaaccgaaccgcacaagcgaccgaggtgacccaaccgcaggcatccgactccctagacagatcctctctccccggcaaactaaacaaaacttagggccaaggaacatacacacccaacagaacccagaccccggcccacggcgccgcgcccccaacccccgacaaccagagggagcccccaaccaatcccgccggctcccccggtgcccacaggcagggacaccaacccccgaacagacccagcacccaaccatcgacaatccaagacgggggggcccccccaaaaaaaggcccccaggggccgacagccagcaccgcgaggaagcccacccaccccacacacgaccacggcaaccaaaccagaacccagaccaccctgggccaccagctcccagactcggccatcaccccgcagaaaggaaaggccacaacccgcgcaccccagccccgatccggcggggagccacccaacccgaaccagcacccaagagcgatccccgaaggacccccgaaccgcaaaggacatcagtatcccacagcctctccaagtcccccggtctcctcctcttctcgaagggaccaaaagatcaatccaccacacccgacgacactcaactccccacccctaaaggagacaccgggaatcccagaatcaagactcatccaatgtccatcatgggtctcaaggtgaacgtctctgccatattcatggcagtactgttaactctccaaacacccaccggtcaaatccattggggcaatctctctaagataggggtggtaggaataggaagtgcaagctacaaagttatgactcgttccagccatcaatcattagtcataaaattaatgcccaatataactctcctcaataactgcacgagggtagagattgcagaatacaggagactactgagaacagttttggaaccaattagagatgcacttaatgcaatgacccagaatataagaccggttcagagtgtagcttcaagtaggagacacaagagatttgcgggagtagtcctggcaggtgcggccctaggcgttgccacagctgctcagataacagccggcattgcacttcaccagtccatgctgaactctcaagccatcgacaatctgagagcgagcctggaaactactaatcaggcaattgagacaatcagacaagcagggcaggagatgatattggctgttcagggtgtccaagactacatcaataatgagctgataccgtctatgaaccaactatcttgtgatttaatcggccagaagctcgggctcaaattgctcagatactatacagaaatcctgtcattatttggccccagtttacgggaccccatatctgcggagatatctatccaggctttgagctatgcgcttggaggagacatcaataaggtgttagaaaagctcggatacagtggaggtgatttactgggcatcttagagagcggaggaataaaggcccggataactcacgtcgacacagagtcctacttcattgtcctcagtatagcctatccgacgctgtccgagattaagggggtgattgtccaccggctagagggggtctcgtacaacataggctctcaagagtggtataccactgtgcccaagtatgttgcaacccaagggtaccttatctcgaattttgatgagtcatcgtgtactttcatgccagaggggactgtgtgcagccaaaatgccttgtacccgatgagtcctctgctccaagaatgcctccgggggtacaccaagtcctgtgctcgtacactcgtatccgggtcttttgggaaccggttcattttatcacaagggaacctaatagccaattgtgcatcaatcctttgcaagtgttacacaacaggaacgatcattaatcaagaccctgacaagatcctaacatacattgctgccgatcactgcccggtagtcgaggtgaacggcgtgaccatccaagtcgggagcaggaggtatccagacgctgtgtacttgcacagaattgacctcggtcctcccatatcattggagaggttggacgtagggacaaatctggggaatgcaattgctaagttggaggatgccaaggaattgttggagtcatcggaccagatattgaggagtatgaaaggtttatcgagcactagcatagtctacatcctgattgcagtgtgtcttggagggttgatagggatccccgctttaatatgttgctgcagggggcgttgtaacaaaaagggagaacaagttggtatgtcaagaccaggcctaaagcctgatcttacgggaacatcaaaatcctatgtaaggtcgctctgatcctctacaactcttgaaacacaaatgtcccacaagtctcctcttcgtcatcaagcaaccaccgcacccagcatcaagcccacctgaaattatctccggcttccctctggccgaacaatatcggtagttaatcaaaacttagggtgcaagatcatccacaatgtcaccacaacgagaccggataaatgccttctacaaagataacccccatcccaagggaagtaggatagtcattaacagagaacatcttatgattgatagaccttatgttttgctggctgttctgtttgtcatgtttctgagcttgatcgggttgctagccattgcaggcattagacttcatcgggcagccatctacaccgcagagatccataaaagcctcagcaccaatctagatgtaactaactcaatcgagcatcaggtcaaggacgtgctgacaccactcttcaaaatcatcggtgatgaagtgggcctgaggacacctcagagattcactgacctagtgaaattaatctctgacaagattaaattccttaatccggatagggagtacgacttcagagatctcacttggtgtatcaacccgccagagagaatcaaattggattatgatcaatactgtgcagatgtggctgctgaagagctcatgaatgcattggtgaactcaactctactggagaccagaacaaccaatcagttcctagctgtctcaaagggaaactgctcagggcccactacaatcagaggtcaattctcaaacatgtcgctgtccctgttagacttgtatttaggtcgaggttacaatgtgtcatctatagtcactatgacatcccagggaatgtatgggggaacttacctagtggaaaagcctaatctgagcagcaaaaggtcagagttgtcacaactgagcatgtaccgagtgtttgaagtaggtgttatcagaaatccgggtttgggggctccggtgttccatatgacaaactatcttgagcaaccagtcagtaatgatctcagcaactgtatggtggctttgggggagctcaaactcgcagccctttgtcacggggaagattctatcacaattccctatcagggatcagggaaaggtgtcagcttccagctcgtcaagctaggtgtctggaaatccccaaccgacatgcaatcctgggtccccttatcaacggatgatccagtgatagacaggctttacctctcatctcacagaggtgttatcgctgacaatcaagcaaaatgggctgtcccgacaacacgaacagatgacaagttgcgaatggagacatgcttccaacaggcgtgtaagggtaaaatccaagcactctgcgagaatcccgagtgggcaccattgaaggataacaggattccttcatacggggtcttgtctgttgatctgagtctgacagttgagcttaaaatcaaaattgcttcgggattcgggccattgatcacacacggttcagggatggacctatacaaatccaaccacaacaatgtgtattggctgactatcccgccaatgaagaacctagccttaggtgtaatcaacacattggagtggataccgagattcaaggttagtccctacctcttcactgtcccaattaaggaagcaggcgaagactgccatgccccaacatacctacctgcggaggtggatggtgatgtcaaactcagttccaatctggtgattctacctggtcaagatctccaatatgttttggcaacctacgatacttccagggttgaacatgctgtggtttattacgtttacagcccaagccgctcattttcttacttttatccttttaggttgcctataaagggggtccccatcgaattacaagtggaatgcttcacatgggaccaaaaactctggtgccgtcacttctgtgtgcttgcggactcagaatctggtggacatatcactcactctgggatggtgggcatgggagtcagctgcacagtcacccgggaagatggaaccaatcgcagatagggctgctagtgaaccaatcacatgatgtcacccagacatcaggcatacccactagtgtgaaatagacatcagaattaagaaaaacgtagggtccaagtggttccccgttatggactcgctatctgtcaaccagatcttataccctgaagttcacctagatagcccgatagttaccaataagatagtagccatcctggagtatgctcgagtccctcacgcttacagcctggaggaccctacactgtgtcagaacatcaagcaccgcctaaaaaacggattttccaaccaaatgattataaacaatgtggaagttgggaatgtcatcaagtccaagcttaggagttatccggcccactctcatattccatatccaaattgtaatcaggatttatttaacatagaagacaaagagtcaacgaggaagatccgtgaactcctcaaaaaggggaattcgctgtactccaaagtcagtgataaggttttccaatgcttaagggacactaactcacggcttggcctaggctccgaattgagggaggacatcaaggagaaagttattaacttgggagtttacatgcacagctcccagtggtttgagccctttctgttttggtttacagtcaagactgagatgaggtcagtgattaaatcacaaacccatacttgccataggaggagacacacacctgtattcttcactggtagttcagttgagttgctaatctctcgtgaccttgttgctataatcagtaaagagtctcaacatgtatattacctgacatttgaactggttttgatgtattgtgatgtcatagaggggaggttaatgacagagaccgctatgactattgatgctaggtatacagagcttctaggaagagtcagatacatgtggaaactgatagatggtttcttccctgcactcgggaatccaacttatcaaattgtagccatgctggagcctctttcacttgcttacctgcagctgagggatataacagtagaactcagaggtgctttccttaaccactgctttactgaaatacatgatgttcttgaccaaaacgggttttctgatgaaggtacttatcatgagttaactgaagctctagattacattttcataactgatgacatacatctgacaggggagattttctcatttttcagaagtttcggccaccccagacttgaagcagtaacggctgctgaaaatgttaggaaatacatgaatcagcctaaagtcattgtgtatgagactctgatgaaaggtcatgccatattttgtggaatcataatcaacggctatcgtgacaggcacggaggcagttggccaccgctgaccctccccctgcatgctgcagacacaatccggaatgctcaagcttcaggtgaagggttaacacatgagcagtgcgttgataactggaaatcttttgctggagtgaaatttggctgctttatgcctcttagcctggatagtgatctgacaatgtacctaaaggacaaggcacttgctgctctccaaagggaatgggattcagtttacccgaaagagttcctgcgttacgaccctcccaagggaaccgggtcacggaggcttgtagatgttttccttaatgattcgagctttgacccatatgatgtgataatgtatgttgtaagtggagcttacctccatgaccctgagttcaacctgtcttacagcctgaaagaaaaggagatcaaggaaacaggtagactttttgctaaaatgacttacaaaatgagggcatgccaagtgattgctgaaaatctaatctcaaacgggattggcaaatattttaaggacaatgggatggccaaggatgagcacgatttgactaaggcactccacactctagctgtctcaggagtccccaaagatctcaaagaaagtcacaggggggggccagtcttaaaaacctactcccgaagcccagtccacacaagtaccaggaacgtgagagcagcaaaagggtttatagggttccctcaagtaattcggcaggaccaagacactgatcatccggagaatatggaagcttacgagacagtcagtgcatttatcacgactgatctcaagaagtactgccttaattggagatatgagaccatcagcttgtttgcacagaggctaaatgagatttacggattgccctcatttttccagtggctgcataagaggcttgagacctctgtcctgtatgtaagtgaccctcattgcccccccgaccttgacgcccatatcccgttatataaagtccccaatgatcaaatcttcattaagtaccctatgggaggtatagaagggtattgtcagaagctgtggaccatcagcaccattccctatctatacctggctgcttatgagagcggagtaaggattgcttcgttagtgcaaggggacaatcagaccatagccgtaacaaaaagggtacccagcacatggccctacaaccttaagaaacgggaagctgctagagtaactagagattactttgtaattcttaggcaaaggctacatgatattggccatcacctcaaggcaaatgagacaattgtttcatcacatttttttgtctattcaaaaggaatatattatgatgggctacttgtgtcccaatcactcaagagcatcgcaagatgtgtattctggtcagagactatagttgatgaaacaagggcagcatgcagtaatattgctacaacaatggctaaaagcatcgagagaggttatgaccgttaccttgcatattccctgaacgtcctaaaagtgatacagcaaattctgatctctcttggcttcacaatcaattcaaccatgacccgggatgtagtcatacccctcctcacaaacaacgacctcttaataaggatggcactgttgcccgctcctattggggggatgaattatctgaatatgagcaggctgtttgtcagaaacatcggtgatccagtaacatcatcaattgctgatctcaagagaatgattctcgcctcactaatgcctgaagagaccctccatcaagtaatgacacaacaaccgggggactcttcattcctagactgggctagcgacccttactcagcaaatcttgtatgtgtccagagcatcactagactcctcaagaacataactgcaaggtttgtcctgatccatagtccaaacccaatgttaaaaggattattccatgatgacagtaaagaagaggacgagggactggcggcattcctcatggacaggcatattatagtacctagggcagctcatgaaatcctggatcatagtgtcacaggggcaagagagtctattgcaggcatgctggataccacaaaaggcttgattcgagccagcatgaggaagggggggttaacctctcgagtgataaccagattgtccaattatgactatgaacaattcagagcagggatggtgctattgacaggaagaaagagaaatgtcctcattgacaaagagtcatgttcagtgcagctggcgagagctctaagaagccatatgtgggcgaggctagctcgaggacggcctatttacggccttgaggtccctgatgtactagaatctatgcgaggccaccttattcggcgtcatgagacatgtgtcatctgcgagtgtggatcagtcaactacggatggttttttgtcccctcgggttgccaactggatgatattgacaaggaaacatcatccttgagagtcccatatattggttctaccactgatgagagaacagacatgaagcttgccttcgtaagagccccaagtcgatccttgcgatctgctgttagaatagcaacagtgtactcatgggcttacggtgatgatgatagctcttggaacgaagcctggttgttggctaggcaaagggccaatgtgagcctggaggagctaagggtgatcactcccatctcaacttcgactaatttagcgcataggttgagggatcgtagcactcaagtgaaatactcaggtacatcccttgtccgagtggcgaggtataccacaatctccaacgacaatctctcatttgtcatatcagataagaaggttgatactaactttatataccaacaaggaatgcttctagggttgggtgttttagaaacattgtttcgactcgagaaagataccggatcatctaacacggtattacatcttcacgtcgaaacagattgttgcgtgatcccgatgatagatcatcccaggatacccagctcccgcaagctagagctgagggcagagctatgtaccaacccattgatatatgataatgcacctttaattgacagagatgcaacaaggctatacacccagagccataggaggcaccttgtggaatttgttacatggtccacaccccaactatatcacattttagctaagtccacagcactatctatgattgacctggtaacaaaatttgagaaggaccatatgaatgaaatttcagctctcataggggatgacgatatcaatagtttcataactgagtttctgctcatagagccaagattattcactatctacttgggccagtgtgcggccatcaattgggcatttgatgtacattatcatagaccatcagggaaatatcagatgggtgagctgttgtcatcgttcctttctagaatgagcaaaggagtgtttaaggtgcttgtcaatgctctaagccacccaaagatctacaagaaattctggcattgtggtattatagagcctatccatggtccttcacttgatgctcaaaacttgcacacaactgtgtgcaacatggtttacacatgctatatgacctacctcgacctgttgttgaatgaagagttagaagagttcacatttctcttgtgtgaaagcgacgaggatgtagtaccggacagattcgacaacatccaggcaaaacacttatgtgttctggcagatttgtactgtcaaccagggacctgcccaccaattcgaggtctaagaccggtagagaaatgtgcagttctaaccgaccatatcaaggcagaggctatgttatctccagcaggatcttcgtggaacataaatccaattattgtagaccattactcatgctctctgacttatctccggcgaggatcgatcaaacagataagattgagagttgatccaggattcattttcgacgccctcgctgaggtaaatgtcagtcagccaaagatcggcagcaacaacatctcaaatatgagcatcaaggctttcagacccccacacgatgatgttgcaaaattgctcaaagatatcaacacaagcaagcacaatcttcccatttcagggggcaatctcgccaattatgaaatccatgctttccgcagaatcgggttgaactcatctgcttgctacaaagctgttgagatatcaacattaattaggagatgccttgagccaggggaggacggcttgttcttgggtgagggatcgggttctatgttgatcacttataaagagatacttaaactaaacaagtgcttctataatagtggggtttccgccaattctagatctggtcaaagggaattagcaccctatccctccgaagttggccttgtcgaacacagaatgggagtaggtaatattgtcaaagtgctctttaacgggaggcccgaagtcacgtgggtaggcagtgtagattgcttcaatttcatagttagtaatatccctacctctagtgtggggtttatccattcagatatagagaccttgcctgacaaagatactatagagaagctagaggaattggcagccatcttatcgatggctctgctcctgggcaaaataggatcaatactggtgattaagcttatgcctttcagcggggattttgttcagggatttataagttatgtagggtctcattatagagaagtgaaccttgtataccctagatacagcaacttcatctctactgaatcttatttggttatgacagatctcaaggctaaccggctaatgaatcctgaaaagattaagcagcagataattgaatcatctgtgaggacttcacctggacttataggtcacatcctatccattaagcaactaagctgcatacaagcaattgtgggagacgcagttagtagaggtgatatcaatcctactctgaaaaaacttacacctatagagcaggtgctgatcaattgcgggttggcaattaacggacctaagctgtgcaaagaattgatccaccatgatgttgcctcagggcaagatggattgcttaattctatactcatcctctacagggagttggcaagattcaaagacaaccaaagaagtcaacaagggatgttccacgcttaccccgtattggtaagtagcaggcaacgagaacttatatctaggatcacccgcaaattctgggggcacattcttctttactccgggaacaaaaagttgataaataagtttatccagaatctcaagtccggctatctgatactagacttacaccagaatatcttcgttaagaatctatccaagtcagagaaacagattattatgacggggggtttgaaacgtgagtgggtttttaaggtaacagtcaaggagaccaaagaatggtataagttagtcggatacagtgccctgattaaggactaattggttgaactccggaaccctaatcctgccctaggtggttaggcattatttgcaatatattaaagaaaactttgaaaatacgaagtttctattcccagctttgtctggtggccggcatggtcccagcctcctcgctggcgccggctgggcaacattccgaggggaccgtcccctcggtaatggcgaatgggacgcggccgatccggctgctaacaaagcccgaaaggaagctgagttggctgctgccaccgctgagcaataactagcataaccccttggggcctctaaacgggtcttgaggggttttttgctgaaaggaggaactatatccggatgcggccgccatgaacaataaaactgtctgcttacataaacagtaatacaaggggtgttatgagccatattcaacgggaaacgtcgaggccgcgattaaattccaacatggatgctgatttatatgggtataaatgggctcgcgataatgtcgggcaatcaggtgcgacaatctatcgcttgtatgggaagcccgatgcgccagagttgtttctgaaacatggcaaaggtagcgttgccaatgatgttacagatgagatggtcagactaaactggctgacggaatttatgcctcttccgaccatcaagcattttatccgtactcctgatgatgcatggttactcaccactgcgatccccggaaaaacagcattccaggtattagaagaatatcctgattcaggtgaaaatattgttgatgcgctggcagtgttcctgcgccggttgcattcgattcctgtttgtaattgtccttttaacagcgatcgtgtatttcgtctcgctcaggcgcaatcacgaatgaataacggtttggttgatgcgagtgattttgatgacgagcgtaatggctggcctgttgaacaagtctggaaagaaatgcataaacttttgccattctcaccggattcagtcgtcactcatggtgatttctcacttgataaccttatttttgacgaggggaaattaataggttgtattgatgttggacgagtcggaatcgcagaccgataccaggatcttgccatcctatggaactgcctcggtgagttttctccttcattacagaaacggctttttcaaaaatatggtattgataatcctgatatgaataaattgcagtttcatttgatgctcgatgagtttttctaatcagaattggttaattggttgtaacattattcagattgggccccgttccactgagcgtcagaccccgtagaaaagatcaaaggatcttcttgagatcctttttttctgcgcgtaatctgctgcttgcaaacaaaaaaaccaccgctaccagcggtggtttgtttgccggatcaagagctaccaactctttttccgaaggtaactggcttcagcagagcgcagataccaaatactgttcttctagtgtagccgtagttaggccaccacttcaagaactctgtagcaccgcctacatacctcgctctgctaatcctgttaccagtggctgctgccagtggcgataagtcgtgtcttaccgggttggactcaagacgatagttaccggataaggcgcagcggtcgggctgaacggggggttcgtgcacacagcccagcttggagcgaacgacctacaccgaactgagatacctacagcgtgagctatgagaaagcgccacgcttcccgaagggagaaaggcggacaggtatccggtaagcggcagggtcggaacaggagagcgcacgagggagcttccagggggaaacgcctggtatctttatagtcctgtcgggtttcgccacctctgacttgagcgtcgatttttgtgatgctcgtcaggggggcggagcctatggaaaaacgccagcaacgcggcctttttacggttcctggccttttgctggccttttgctcacatgttctttcctgcgttatcccctgattctgtggataaccgtattaccgctag

SEQ ID NO: 31 - DNA, 18734 bp, Artificial sequence
  pKP-MVSchw-ATU1(eGFP)
gcgatcgctaatacgactcactatagggccaactttgtttggtctgatgagtccgtgaggacgaaacccggagtcccgggtcaccaaacaaagttgggtaaggatagttcaatcaatgatcatcttctagtgcacttaggattcaagatcctattatcagggacaagagcaggattagggatatccgagacgcgtacgatggtgagcaagggcgaggagctgttcaccggggtggtgcccatcctggtcgagctggacggcgacgtaaacggccacaagttcagcgtgtccggcgagggcgagggcgatgccacctacggcaagctgaccctgaagttcatctgcaccaccggcaagctgcccgtgccctggcccaccctcgtgaccaccctgacctacggcgtgcagtgcttcagccgctaccccgaccacatgaagcagcacgacttcttcaagtccgccatgcccgaaggctacgtccaggagcgcaccatcttcttcaaggacgacggcaactacaagacccgcgccgaggtgaagttcgagggcgacaccctggtgaaccgcatcgagctgaagggcatcgacttcaaggaggacggcaacatcctggggcacaagctggagtacaactacaacagccacaacgtctatatcatggccgacaagcagaagaacggcatcaaggtgaacttcaagatccgccacaacatcgaggacggcagcgtgcagctcgccgaccactaccagcagaacacccccatcggcgacggccccgtgctgctgcccgacaaccactacctgagcacccagtccgccctgagcaaagaccccaacgagaagcgcgatcacatggtcctgctggagttcgtgaccgccgccgggatcactctcggcatggacgagctgtacaagtaggcgcgcagcgcttagacgtctcgcgatcgattagtgcgagaggccgagggccagaacaacatccgcctaccatccatcattgttataaaaaacttaggattcaagatcctattatcagggacaagagcaggattagggatatccgagatggccacacttttaaggagcttagcattgttcaaaagaaacaaggacaaaccacccattacatcaggatccggtggagccatcagaggaatcaaacacattattatagtaccaatccctggagattcctcaattaccactcgatccagacttctggaccggttggtgaggttaattggaaacccggatgtgagcgggcccaaactaacaggggcactaataggtatattatccttatttgtggagtctccaggtcaattgattcagaggatcaccgatgaccctgacgttagcataaggctgttagaggttgtccagagtgaccagtcacaatctggccttaccttcgcatcaagaggtaccaacatggaggatgaggcggaccaatacttttcacatgatgatccaattagtagtgatcaatccaggttcggatggttcgggaacaaggaaatctcagatattgaagtgcaagaccctgagggattcaacatgattctgggtaccatcctagcccaaatttgggtcttgctcgcaaaggcggttacggccccagacacggcagctgattcggagctaagaaggtggataaagtacacccaacaaagaagggtagttggtgaatttagattggagagaaaatggttggatgtggtgaggaacaggattgccgaggacctctccttacgccgattcatggtcgctctaatcctggatatcaagagaacacccggaaacaaacccaggattgctgaaatgatatgtgacattgatacatatatcgtagaggcaggattagccagttttatcctgactattaagtttgggatagaaactatgtatcctgctcttggactgcatgaatttgctggtgagttatccacacttgagtccttgatgaacctttaccagcaaatgggggaaactgcaccctacatggtaatcctggagaactcaattcagaacaagttcagtgcaggatcataccctctgctctggagctatgccatgggagtaggagtggaacttgaaaactccatgggaggtttgaactttggccgatcttactttgatccagcatattttagattagggcaagagatggtaaggaggtcagctggaaaggtcagttccacattggcatctgaactcggtatcactgccgaggatgcaaggcttgtttcagagattgcaatgcatactactgaggacaagatcagtagagcggttggacccagacaagcccaagtatcatttctacacggtgatcaaagtgagaatgagctaccgagattggggggcaaggaagataggagggtcaaacagagtcgaggagaagccagggagagctacagagaaaccgggcccagcagagcaagtgatgcgagagctgcccatcttccaaccggcacacccctagacattgacactgcaacggagtccagccaagatccgcaggacagtcgaaggtcagctgacgccctgcttaggctgcaagccatggcaggaatctcggaagaacaaggctcagacacggacacccctatagtgtacaatgacagaaatcttctagactaggtgcgagaggccgagggccagaacaacatccgcctaccatccatcattgttataaaaaacttaggaaccaggtccacacagccgccagcccatcaaccatccactcccacgattggagccaatggcagaagagcaggcacgccatgtcaaaaacggactggaatgcatccgggctctcaaggccgagcccatcggctcactggccatcgaggaagctatggcagcatggtcagaaatatcagacaacccaggacaggagcgagccacctgcagggaagagaaggcaggcagttcgggtctcagcaaaccatgcctctcagcaattggatcaactgaaggcggtgcacctcgcatccgcggtcagggacctggagagagcgatgacgacgctgaaactttgggaatccccccaagaaatctccaggcatcaagcactgggttacagtgttattacgtttatgatcacagcggtgaagcggttaagggaatccaagatgctgactctatcatggttcaatcaggccttgatggtgatagcaccctctcaggaggagacaatgaatctgaaaacagcgatgtggatattggcgaacctgataccgagggatatgctatcactgaccggggatctgctcccatctctatggggttcagggcttctgatgttgaaactgcagaaggaggggagatccacgagctcctgagactccaatccagaggcaacaactttccgaagcttgggaaaactctcaatgttcctccgcccccggaccccggtagggccagcacttccgggacacccattaaaaagggcacagacgcgagattagcctcatttggaacggagatcgcgtctttattgacaggtggtgcaacccaatgtgctcgaaagtcaccctcggaaccatcagggccaggtgcacctgcggggaatgtccccgagtgtgtgagcaatgccgcactgatacaggagtggacacccgaatctggtaccacaatctccccgagatcccagaataatgaagaagggggagactattatgatgatgagctgttctctgatgtccaagatattaaaacagccttggccaaaatacacgaggataatcagaagataatctccaagctagaatcactgctgttattgaagggagaagttgagtcaattaagaagcagatcaacaggcaaaatatcagcatatccaccctggaaggacacctctcaagcatcatgatcgccattcctggacttgggaaggatcccaacgaccccactgcagatgtcgaaatcaatcccgacttgaaacccatcataggcagagattcaggccgagcactggccgaagttctcaagaaacccgttgccagccgacaactccaaggaatgacaaatggacggaccagttccagaggacagctgctgaaggaatttcagctaaagccgatcgggaaaaagatgagctcagccgtcgggtttgttcctgacaccggccctgcatcacgcagtgtaatccgctccattataaaatccagccggctagaggaggatcggaagcgttacctgatgactctccttgatgatatcaaaggagccaatgatcttgccaagttccaccagatgctgatgaagataataatgaagtagctacagctcaacttacctgccaaccccatgccagtcgacccaactagtacaacctaaatccattataaaaaacttaggagcaaagtgattgcctcccaaggtccacaatgacagagacctacgacttcgacaagtcggcatgggacatcaaagggtcgatcgctccgatacaacccaccacctacagtgatggcaggctggtgccccaggtcagagtcatagatcctggtctaggcgacaggaaggatgaatgctttatgtacatgtttctgctgggggttgttgaggacagcgattccctagggcctccaatcgggcgagcatttgggttcctgcccttaggtgttggcagatccacagcaaagcccgaaaaactcctcaaagaggccactgagcttgacatagttgttagacgtacagcagggctcaatgaaaaactggtgttctacaacaacaccccactaactctcctcacaccttggagaaaggtcctaacaacagggagtgtcttcaacgcaaaccaagtgtgcaatgcggttaatctgataccgctcgataccccgcagaggttccgtgttgtttatatgagcatcacccgtctttcggataacgggtattacaccgttcctagaagaatgctggaattcagatcggtcaatgcagtggccttcaacctgctggtgacccttaggattgacaaggcgataggccctgggaagatcatcgacaatacagagcaacttcctgaggcaacatttatggtccacatcgggaacttcaggagaaagaagagtgaagtctactctgccgattattgcaaaatgaaaatcgaaaagatgggcctggtttttgcacttggtgggatagggggcaccagtcttcacattagaagcacaggcaaaatgagcaagactctccatgcacaactcgggttcaagaagaccttatgttacccgctgatggatatcaatgaagaccttaatcgattactctggaggagcagatgcaagatagtaagaatccaggcagttttgcagccatcagttcctcaagaattccgcatttacgacgacgtgatcataaatgatgaccaaggactattcaaagttctgtagaccgtagtgcccagcaatgcccgaaaacgacccccctcacaatgacagccagaaggcccggacaaaaaagccccctccgaaagactccacggaccaagcgagaggccagccagcagccgacggcaagcgcgaacaccaggcggccccagcacagaacagccctgacacaaggccaccaccagccaccccaatctgcatcctcctcgtgggacccccgaggaccaacccccaaggctgcccccgatccaaaccaccaaccgcatccccaccacccccgggaaagaaacccccagcaattggaaggcccctccccctcttcctcaacacaagaactccacaaccgaaccgcacaagcgaccgaggtgacccaaccgcaggcatccgactccctagacagatcctctctccccggcaaactaaacaaaacttagggccaaggaacatacacacccaacagaacccagaccccggcccacggcgccgcgcccccaacccccgacaaccagagggagcccccaaccaatcccgccggctcccccggtgcccacaggcagggacaccaacccccgaacagacccagcacccaaccatcgacaatccaagacgggggggcccccccaaaaaaaggcccccaggggccgacagccagcaccgcgaggaagcccacccaccccacacacgaccacggcaaccaaaccagaacccagaccaccctgggccaccagctcccagactcggccatcaccccgcagaaaggaaaggccacaacccgcgcaccccagccccgatccggcggggagccacccaacccgaaccagcacccaagagcgatccccgaaggacccccgaaccgcaaaggacatcagtatcccacagcctctccaagtcccccggtctcctcctcttctcgaagggaccaaaagatcaatccaccacacccgacgacactcaactccccacccctaaaggagacaccgggaatcccagaatcaagactcatccaatgtccatcatgggtctcaaggtgaacgtctctgccatattcatggcagtactgttaactctccaaacacccaccggtcaaatccattggggcaatctctctaagataggggtggtaggaataggaagtgcaagctacaaagttatgactcgttccagccatcaatcattagtcataaaattaatgcccaatataactctcctcaataactgcacgagggtagagattgcagaatacaggagactactgagaacagttttggaaccaattagagatgcacttaatgcaatgacccagaatataagaccggttcagagtgtagcttcaagtaggagacacaagagatttgcgggagtagtcctggcaggtgcggccctaggcgttgccacagctgctcagataacagccggcattgcacttcaccagtccatgctgaactctcaagccatcgacaatctgagagcgagcctggaaactactaatcaggcaattgagacaatcagacaagcagggcaggagatgatattggctgttcagggtgtccaagactacatcaataatgagctgataccgtctatgaaccaactatcttgtgatttaatcggccagaagctcgggctcaaattgctcagatactatacagaaatcctgtcattatttggccccagtttacgggaccccatatctgcggagatatctatccaggctttgagctatgcgcttggaggagacatcaataaggtgttagaaaagctcggatacagtggaggtgatttactgggcatcttagagagcggaggaataaaggcccggataactcacgtcgacacagagtcctacttcattgtcctcagtatagcctatccgacgctgtccgagattaagggggtgattgtccaccggctagagggggtctcgtacaacataggctctcaagagtggtataccactgtgcccaagtatgttgcaacccaagggtaccttatctcgaattttgatgagtcatcgtgtactttcatgccagaggggactgtgtgcagccaaaatgccttgtacccgatgagtcctctgctccaagaatgcctccgggggtacaccaagtcctgtgctcgtacactcgtatccgggtcttttgggaaccggttcattttatcacaagggaacctaatagccaattgtgcatcaatcctttgcaagtgttacacaacaggaacgatcattaatcaagaccctgacaagatcctaacatacattgctgccgatcactgcccggtagtcgaggtgaacggcgtgaccatccaagtcgggagcaggaggtatccagacgctgtgtacttgcacagaattgacctcggtcctcccatatcattggagaggttggacgtagggacaaatctggggaatgcaattgctaagttggaggatgccaaggaattgttggagtcatcggaccagatattgaggagtatgaaaggtttatcgagcactagcatagtctacatcctgattgcagtgtgtcttggagggttgatagggatccccgctttaatatgttgctgcagggggcgttgtaacaaaaagggagaacaagttggtatgtcaagaccaggcctaaagcctgatcttacgggaacatcaaaatcctatgtaaggtcgctctgatcctctacaactcttgaaacacaaatgtcccacaagtctcctcttcgtcatcaagcaaccaccgcacccagcatcaagcccacctgaaattatctccggcttccctctggccgaacaatatcggtagttaatcaaaacttagggtgcaagatcatccacaatgtcaccacaacgagaccggataaatgccttctacaaagataacccccatcccaagggaagtaggatagtcattaacagagaacatcttatgattgatagaccttatgttttgctggctgttctgtttgtcatgtttctgagcttgatcgggttgctagccattgcaggcattagacttcatcgggcagccatctacaccgcagagatccataaaagcctcagcaccaatctagatgtaactaactcaatcgagcatcaggtcaaggacgtgctgacaccactcttcaaaatcatcggtgatgaagtgggcctgaggacacctcagagattcactgacctagtgaaattaatctctgacaagattaaattccttaatccggatagggagtacgacttcagagatctcacttggtgtatcaacccgccagagagaatcaaattggattatgatcaatactgtgcagatgtggctgctgaagagctcatgaatgcattggtgaactcaactctactggagaccagaacaaccaatcagttcctagctgtctcaaagggaaactgctcagggcccactacaatcagaggtcaattctcaaacatgtcgctgtccctgttagacttgtatttaggtcgaggttacaatgtgtcatctatagtcactatgacatcccagggaatgtatgggggaacttacctagtggaaaagcctaatctgagcagcaaaaggtcagagttgtcacaactgagcatgtaccgagtgtttgaagtaggtgttatcagaaatccgggtttgggggctccggtgttccatatgacaaactatcttgagcaaccagtcagtaatgatctcagcaactgtatggtggctttgggggagctcaaactcgcagccctttgtcacggggaagattctatcacaattccctatcagggatcagggaaaggtgtcagcttccagctcgtcaagctaggtgtctggaaatccccaaccgacatgcaatcctgggtccccttatcaacggatgatccagtgatagacaggctttacctctcatctcacagaggtgttatcgctgacaatcaagcaaaatgggctgtcccgacaacacgaacagatgacaagttgcgaatggagacatgcttccaacaggcgtgtaagggtaaaatccaagcactctgcgagaatcccgagtgggcaccattgaaggataacaggattccttcatacggggtcttgtctgttgatctgagtctgacagttgagcttaaaatcaaaattgcttcgggattcgggccattgatcacacacggttcagggatggacctatacaaatccaaccacaacaatgtgtattggctgactatcccgccaatgaagaacctagccttaggtgtaatcaacacattggagtggataccgagattcaaggttagtccctacctcttcactgtcccaattaaggaagcaggcgaagactgccatgccccaacatacctacctgcggaggtggatggtgatgtcaaactcagttccaatctggtgattctacctggtcaagatctccaatatgttttggcaacctacgatacttccagggttgaacatgctgtggtttattacgtttacagcccaagccgctcattttcttacttttatccttttaggttgcctataaagggggtccccatcgaattacaagtggaatgcttcacatgggaccaaaaactctggtgccgtcacttctgtgtgcttgcggactcagaatctggtggacatatcactcactctgggatggtgggcatgggagtcagctgcacagtcacccgggaagatggaaccaatcgcagatagggctgctagtgaaccaatcacatgatgtcacccagacatcaggcatacccactagtgtgaaatagacatcagaattaagaaaaacgtagggtccaagtggttccccgttatggactcgctatctgtcaaccagatcttataccctgaagttcacctagatagcccgatagttaccaataagatagtagccatcctggagtatgctcgagtccctcacgcttacagcctggaggaccctacactgtgtcagaacatcaagcaccgcctaaaaaacggattttccaaccaaatgattataaacaatgtggaagttgggaatgtcatcaagtccaagcttaggagttatccggcccactctcatattccatatccaaattgtaatcaggatttatttaacatagaagacaaagagtcaacgaggaagatccgtgaactcctcaaaaaggggaattcgctgtactccaaagtcagtgataaggttttccaatgcttaagggacactaactcacggcttggcctaggctccgaattgagggaggacatcaaggagaaagttattaacttgggagtttacatgcacagctcccagtggtttgagccctttctgttttggtttacagtcaagactgagatgaggtcagtgattaaatcacaaacccatacttgccataggaggagacacacacctgtattcttcactggtagttcagttgagttgctaatctctcgtgaccttgttgctataatcagtaaagagtctcaacatgtatattacctgacatttgaactggttttgatgtattgtgatgtcatagaggggaggttaatgacagagaccgctatgactattgatgctaggtatacagagcttctaggaagagtcagatacatgtggaaactgatagatggtttcttccctgcactcgggaatccaacttatcaaattgtagccatgctggagcctctttcacttgcttacctgcagctgagggatataacagtagaactcagaggtgctttccttaaccactgctttactgaaatacatgatgttcttgaccaaaacgggttttctgatgaaggtacttatcatgagttaactgaagctctagattacattttcataactgatgacatacatctgacaggggagattttctcatttttcagaagtttcggccaccccagacttgaagcagtaacggctgctgaaaatgttaggaaatacatgaatcagcctaaagtcattgtgtatgagactctgatgaaaggtcatgccatattttgtggaatcataatcaacggctatcgtgacaggcacggaggcagttggccaccgctgaccctccccctgcatgctgcagacacaatccggaatgctcaagcttcaggtgaagggttaacacatgagcagtgcgttgataactggaaatcttttgctggagtgaaatttggctgctttatgcctcttagcctggatagtgatctgacaatgtacctaaaggacaaggcacttgctgctctccaaagggaatgggattcagtttacccgaaagagttcctgcgttacgaccctcccaagggaaccgggtcacggaggcttgtagatgttttccttaatgattcgagctttgacccatatgatgtgataatgtatgttgtaagtggagcttacctccatgaccctgagttcaacctgtcttacagcctgaaagaaaaggagatcaaggaaacaggtagactttttgctaaaatgacttacaaaatgagggcatgccaagtgattgctgaaaatctaatctcaaacgggattggcaaatattttaaggacaatgggatggccaaggatgagcacgatttgactaaggcactccacactctagctgtctcaggagtccccaaagatctcaaagaaagtcacaggggggggccagtcttaaaaacctactcccgaagcccagtccacacaagtaccaggaacgtgagagcagcaaaagggtttatagggttccctcaagtaattcggcaggaccaagacactgatcatccggagaatatggaagcttacgagacagtcagtgcatttatcacgactgatctcaagaagtactgccttaattggagatatgagaccatcagcttgtttgcacagaggctaaatgagatttacggattgccctcatttttccagtggctgcataagaggcttgagacctctgtcctgtatgtaagtgaccctcattgcccccccgaccttgacgcccatatcccgttatataaagtccccaatgatcaaatcttcattaagtaccctatgggaggtatagaagggtattgtcagaagctgtggaccatcagcaccattccctatctatacctggctgcttatgagagcggagtaaggattgcttcgttagtgcaaggggacaatcagaccatagccgtaacaaaaagggtacccagcacatggccctacaaccttaagaaacgggaagctgctagagtaactagagattactttgtaattcttaggcaaaggctacatgatattggccatcacctcaaggcaaatgagacaattgtttcatcacatttttttgtctattcaaaaggaatatattatgatgggctacttgtgtcccaatcactcaagagcatcgcaagatgtgtattctggtcagagactatagttgatgaaacaagggcagcatgcagtaatattgctacaacaatggctaaaagcatcgagagaggttatgaccgttaccttgcatattccctgaacgtcctaaaagtgatacagcaaattctgatctctcttggcttcacaatcaattcaaccatgacccgggatgtagtcatacccctcctcacaaacaacgacctcttaataaggatggcactgttgcccgctcctattggggggatgaattatctgaatatgagcaggctgtttgtcagaaacatcggtgatccagtaacatcatcaattgctgatctcaagagaatgattctcgcctcactaatgcctgaagagaccctccatcaagtaatgacacaacaaccgggggactcttcattcctagactgggctagcgacccttactcagcaaatcttgtatgtgtccagagcatcactagactcctcaagaacataactgcaaggtttgtcctgatccatagtccaaacccaatgttaaaaggattattccatgatgacagtaaagaagaggacgagggactggcggcattcctcatggacaggcatattatagtacctagggcagctcatgaaatcctggatcatagtgtcacaggggcaagagagtctattgcaggcatgctggataccacaaaaggcttgattcgagccagcatgaggaagggggggttaacctctcgagtgataaccagattgtccaattatgactatgaacaattcagagcagggatggtgctattgacaggaagaaagagaaatgtcctcattgacaaagagtcatgttcagtgcagctggcgagagctctaagaagccatatgtgggcgaggctagctcgaggacggcctatttacggccttgaggtccctgatgtactagaatctatgcgaggccaccttattcggcgtcatgagacatgtgtcatctgcgagtgtggatcagtcaactacggatggttttttgtcccctcgggttgccaactggatgatattgacaaggaaacatcatccttgagagtcccatatattggttctaccactgatgagagaacagacatgaagcttgccttcgtaagagccccaagtcgatccttgcgatctgctgttagaatagcaacagtgtactcatgggcttacggtgatgatgatagctcttggaacgaagcctggttgttggctaggcaaagggccaatgtgagcctggaggagctaagggtgatcactcccatctcaacttcgactaatttagcgcataggttgagggatcgtagcactcaagtgaaatactcaggtacatcccttgtccgagtggcgaggtataccacaatctccaacgacaatctctcatttgtcatatcagataagaaggttgatactaactttatataccaacaaggaatgcttctagggttgggtgttttagaaacattgtttcgactcgagaaagataccggatcatctaacacggtattacatcttcacgtcgaaacagattgttgcgtgatcccgatgatagatcatcccaggatacccagctcccgcaagctagagctgagggcagagctatgtaccaacccattgatatatgataatgcacctttaattgacagagatgcaacaaggctatacacccagagccataggaggcaccttgtggaatttgttacatggtccacaccccaactatatcacattttagctaagtccacagcactatctatgattgacctggtaacaaaatttgagaaggaccatatgaatgaaatttcagctctcataggggatgacgatatcaatagtttcataactgagtttctgctcatagagccaagattattcactatctacttgggccagtgtgcggccatcaattgggcatttgatgtacattatcatagaccatcagggaaatatcagatgggtgagctgttgtcatcgttcctttctagaatgagcaaaggagtgtttaaggtgcttgtcaatgctctaagccacccaaagatctacaagaaattctggcattgtggtattatagagcctatccatggtccttcacttgatgctcaaaacttgcacacaactgtgtgcaacatggtttacacatgctatatgacctacctcgacctgttgttgaatgaagagttagaagagttcacatttctcttgtgtgaaagcgacgaggatgtagtaccggacagattcgacaacatccaggcaaaacacttatgtgttctggcagatttgtactgtcaaccagggacctgcccaccaattcgaggtctaagaccggtagagaaatgtgcagttctaaccgaccatatcaaggcagaggctatgttatctccagcaggatcttcgtggaacataaatccaattattgtagaccattactcatgctctctgacttatctccggcgaggatcgatcaaacagataagattgagagttgatccaggattcattttcgacgccctcgctgaggtaaatgtcagtcagccaaagatcggcagcaacaacatctcaaatatgagcatcaaggctttcagacccccacacgatgatgttgcaaaattgctcaaagatatcaacacaagcaagcacaatcttcccatttcagggggcaatctcgccaattatgaaatccatgctttccgcagaatcgggttgaactcatctgcttgctacaaagctgttgagatatcaacattaattaggagatgccttgagccaggggaggacggcttgttcttgggtgagggatcgggttctatgttgatcacttataaagagatacttaaactaaacaagtgcttctataatagtggggtttccgccaattctagatctggtcaaagggaattagcaccctatccctccgaagttggccttgtcgaacacagaatgggagtaggtaatattgtcaaagtgctctttaacgggaggcccgaagtcacgtgggtaggcagtgtagattgcttcaatttcatagttagtaatatccctacctctagtgtggggtttatccattcagatatagagaccttgcctgacaaagatactatagagaagctagaggaattggcagccatcttatcgatggctctgctcctgggcaaaataggatcaatactggtgattaagcttatgcctttcagcggggattttgttcagggatttataagttatgtagggtctcattatagagaagtgaaccttgtataccctagatacagcaacttcatctctactgaatcttatttggttatgacagatctcaaggctaaccggctaatgaatcctgaaaagattaagcagcagataattgaatcatctgtgaggacttcacctggacttataggtcacatcctatccattaagcaactaagctgcatacaagcaattgtgggagacgcagttagtagaggtgatatcaatcctactctgaaaaaacttacacctatagagcaggtgctgatcaattgcgggttggcaattaacggacctaagctgtgcaaagaattgatccaccatgatgttgcctcagggcaagatggattgcttaattctatactcatcctctacagggagttggcaagattcaaagacaaccaaagaagtcaacaagggatgttccacgcttaccccgtattggtaagtagcaggcaacgagaacttatatctaggatcacccgcaaattctgggggcacattcttctttactccgggaacaaaaagttgataaataagtttatccagaatctcaagtccggctatctgatactagacttacaccagaatatcttcgttaagaatctatccaagtcagagaaacagattattatgacggggggtttgaaacgtgagtgggtttttaaggtaacagtcaaggagaccaaagaatggtataagttagtcggatacagtgccctgattaaggactaattggttgaactccggaaccctaatcctgccctaggtggttaggcattatttgcaatatattaaagaaaactttgaaaatacgaagtttctattcccagctttgtctggtggccggcatggtcccagcctcctcgctggcgccggctgggcaacattccgaggggaccgtcccctcggtaatggcgaatgggacgcggccgatccggctgctaacaaagcccgaaaggaagctgagttggctgctgccaccgctgagcaataactagcataaccccttggggcctctaaacgggtcttgaggggttttttgctgaaaggaggaactatatccggatgcggccgccatgaacaataaaactgtctgcttacataaacagtaatacaaggggtgttatgagccatattcaacgggaaacgtcgaggccgcgattaaattccaacatggatgctgatttatatgggtataaatgggctcgcgataatgtcgggcaatcaggtgcgacaatctatcgcttgtatgggaagcccgatgcgccagagttgtttctgaaacatggcaaaggtagcgttgccaatgatgttacagatgagatggtcagactaaactggctgacggaatttatgcctcttccgaccatcaagcattttatccgtactcctgatgatgcatggttactcaccactgcgatccccggaaaaacagcattccaggtattagaagaatatcctgattcaggtgaaaatattgttgatgcgctggcagtgttcctgcgccggttgcattcgattcctgtttgtaattgtccttttaacagcgatcgtgtatttcgtctcgctcaggcgcaatcacgaatgaataacggtttggttgatgcgagtgattttgatgacgagcgtaatggctggcctgttgaacaagtctggaaagaaatgcataaacttttgccattctcaccggattcagtcgtcactcatggtgatttctcacttgataaccttatttttgacgaggggaaattaataggttgtattgatgttggacgagtcggaatcgcagaccgataccaggatcttgccatcctatggaactgcctcggtgagttttctccttcattacagaaacggctttttcaaaaatatggtattgataatcctgatatgaataaattgcagtttcatttgatgctcgatgagtttttctaatcagaattggttaattggttgtaacattattcagattgggccccgttccactgagcgtcagaccccgtagaaaagatcaaaggatcttcttgagatcctttttttctgcgcgtaatctgctgcttgcaaacaaaaaaaccaccgctaccagcggtggtttgtttgccggatcaagagctaccaactctttttccgaaggtaactggcttcagcagagcgcagataccaaatactgttcttctagtgtagccgtagttaggccaccacttcaagaactctgtagcaccgcctacatacctcgctctgctaatcctgttaccagtggctgctgccagtggcgataagtcgtgtcttaccgggttggactcaagacgatagttaccggataaggcgcagcggtcgggctgaacggggggttcgtgcacacagcccagcttggagcgaacgacctacaccgaactgagatacctacagcgtgagctatgagaaagcgccacgcttcccgaagggagaaaggcggacaggtatccggtaagcggcagggtcggaacaggagagcgcacgagggagcttccagggggaaacgcctggtatctttatagtcctgtcgggtttcgccacctctgacttgagcgtcgatttttgtgatgctcgtcaggggggcggagcctatggaaaaacgccagcaacgcggcctttttacggttcctggccttttgctggccttttgctcacatgttctttcctgcgttatcccctgattctgtggataaccgtattaccgctag

SEQ ID NO: 32 - DNA, 18686 bp, Artificial sequence
  pKP-MVSchw-ATU2(eGFP)
gcgatcgctaatacgactcactatagggccaactttgtttggtctgatgagtccgtgaggacgaaacccggagtcccgggtcaccaaacaaagttgggtaaggatagttcaatcaatgatcatcttctagtgcacttaggattcaagatcctattatcagggacaagagcaggattagggatatccgagatggccacacttttaaggagcttagcattgttcaaaagaaacaaggacaaaccacccattacatcaggatccggtggagccatcagaggaatcaaacacattattatagtaccaatccctggagattcctcaattaccactcgatccagacttctggaccggttggtgaggttaattggaaacccggatgtgagcgggcccaaactaacaggggcactaataggtatattatccttatttgtggagtctccaggtcaattgattcagaggatcaccgatgaccctgacgttagcataaggctgttagaggttgtccagagtgaccagtcacaatctggccttaccttcgcatcaagaggtaccaacatggaggatgaggcggaccaatacttttcacatgatgatccaattagtagtgatcaatccaggttcggatggttcgggaacaaggaaatctcagatattgaagtgcaagaccctgagggattcaacatgattctgggtaccatcctagcccaaatttgggtcttgctcgcaaaggcggttacggccccagacacggcagctgattcggagctaagaaggtggataaagtacacccaacaaagaagggtagttggtgaatttagattggagagaaaatggttggatgtggtgaggaacaggattgccgaggacctctccttacgccgattcatggtcgctctaatcctggatatcaagagaacacccggaaacaaacccaggattgctgaaatgatatgtgacattgatacatatatcgtagaggcaggattagccagttttatcctgactattaagtttgggatagaaactatgtatcctgctcttggactgcatgaatttgctggtgagttatccacacttgagtccttgatgaacctttaccagcaaatgggggaaactgcaccctacatggtaatcctggagaactcaattcagaacaagttcagtgcaggatcataccctctgctctggagctatgccatgggagtaggagtggaacttgaaaactccatgggaggtttgaactttggccgatcttactttgatccagcatattttagattagggcaagagatggtaaggaggtcagctggaaaggtcagttccacattggcatctgaactcggtatcactgccgaggatgcaaggcttgtttcagagattgcaatgcatactactgaggacaagatcagtagagcggttggacccagacaagcccaagtatcatttctacacggtgatcaaagtgagaatgagctaccgagattggggggcaaggaagataggagggtcaaacagagtcgaggagaagccagggagagctacagagaaaccgggcccagcagagcaagtgatgcgagagctgcccatcttccaaccggcacacccctagacattgacactgcaacggagtccagccaagatccgcaggacagtcgaaggtcagctgacgccctgcttaggctgcaagccatggcaggaatctcggaagaacaaggctcagacacggacacccctatagtgtacaatgacagaaatcttctagactaggtgcgagaggccgagggccagaacaacatccgcctaccatccatcattgttataaaaaacttaggaaccaggtccacacagccgccagcccatcaaccatccactcccacgattggagccaatggcagaagagcaggcacgccatgtcaaaaacggactggaatgcatccgggctctcaaggccgagcccatcggctcactggccatcgaggaagctatggcagcatggtcagaaatatcagacaacccaggacaggagcgagccacctgcagggaagagaaggcaggcagttcgggtctcagcaaaccatgcctctcagcaattggatcaactgaaggcggtgcacctcgcatccgcggtcagggacctggagagagcgatgacgacgctgaaactttgggaatccccccaagaaatctccaggcatcaagcactgggttacagtgttattacgtttatgatcacagcggtgaagcggttaagggaatccaagatgctgactctatcatggttcaatcaggccttgatggtgatagcaccctctcaggaggagacaatgaatctgaaaacagcgatgtggatattggcgaacctgataccgagggatatgctatcactgaccggggatctgctcccatctctatggggttcagggcttctgatgttgaaactgcagaaggaggggagatccacgagctcctgagactccaatccagaggcaacaactttccgaagcttgggaaaactctcaatgttcctccgcccccggaccccggtagggccagcacttccgggacacccattaaaaagggcacagacgcgagattagcctcatttggaacggagatcgcgtctttattgacaggtggtgcaacccaatgtgctcgaaagtcaccctcggaaccatcagggccaggtgcacctgcggggaatgtccccgagtgtgtgagcaatgccgcactgatacaggagtggacacccgaatctggtaccacaatctccccgagatcccagaataatgaagaagggggagactattatgatgatgagctgttctctgatgtccaagatattaaaacagccttggccaaaatacacgaggataatcagaagataatctccaagctagaatcactgctgttattgaagggagaagttgagtcaattaagaagcagatcaacaggcaaaatatcagcatatccaccctggaaggacacctctcaagcatcatgatcgccattcctggacttgggaaggatcccaacgaccccactgcagatgtcgaaatcaatcccgacttgaaacccatcataggcagagattcaggccgagcactggccgaagttctcaagaaacccgttgccagccgacaactccaaggaatgacaaatggacggaccagttccagaggacagctgctgaaggaatttcagctaaagccgatcgggaaaaagatgagctcagccgtcgggtttgttcctgacaccggccctgcatcacgcagtgtaatccgctccattataaaatccagccggctagaggaggatcggaagcgttacctgatgactctccttgatgatatcaaaggagccaatgatcttgccaagttccaccagatgctgatgaagataataatgaagtagctacagctcaacttacctgccaaccccatgccagtcgacccaactagcctaccctccatcattgttataaaaaacttaggaaccaggtccacacagccgccagcccatcaacgcgtacgatggtgagcaagggcgaggagctgttcaccggggtggtgcccatcctggtcgagctggacggcgacgtaaacggccacaagttcagcgtgtccggcgagggcgagggcgatgccacctacggcaagctgaccctgaagttcatctgcaccaccggcaagctgcccgtgccctggcccaccctcgtgaccaccctgacctacggcgtgcagtgcttcagccgctaccccgaccacatgaagcagcacgacttcttcaagtccgccatgcccgaaggctacgtccaggagcgcaccatcttcttcaaggacgacggcaactacaagacccgcgccgaggtgaagttcgagggcgacaccctggtgaaccgcatcgagctgaagggcatcgacttcaaggaggacggcaacatcctggggcacaagctggagtacaactacaacagccacaacgtctatatcatggccgacaagcagaagaacggcatcaaggtgaacttcaagatccgccacaacatcgaggacggcagcgtgcagctcgccgaccactaccagcagaacacccccatcggcgacggccccgtgctgctgcccgacaaccactacctgagcacccagtccgccctgagcaaagaccccaacgagaagcgcgatcacatggtcctgctggagttcgtgaccgccgccgggatcactctcggcatggacgagctgtacaagtaggcgcgcagcgcttagacgtctcgcgatcgatactagtacaacctaaatccattataaaaaacttaggagcaaagtgattgcctcccaaggtccacaatgacagagacctacgacttcgacaagtcggcatgggacatcaaagggtcgatcgctccgatacaacccaccacctacagtgatggcaggctggtgccccaggtcagagtcatagatcctggtctaggcgacaggaaggatgaatgctttatgtacatgtttctgctgggggttgttgaggacagcgattccctagggcctccaatcgggcgagcatttgggttcctgcccttaggtgttggcagatccacagcaaagcccgaaaaactcctcaaagaggccactgagcttgacatagttgttagacgtacagcagggctcaatgaaaaactggtgttctacaacaacaccccactaactctcctcacaccttggagaaaggtcctaacaacagggagtgtcttcaacgcaaaccaagtgtgcaatgcggttaatctgataccgctcgataccccgcagaggttccgtgttgtttatatgagcatcacccgtctttcggataacgggtattacaccgttcctagaagaatgctggaattcagatcggtcaatgcagtggccttcaacctgctggtgacccttaggattgacaaggcgataggccctgggaagatcatcgacaatacagagcaacttcctgaggcaacatttatggtccacatcgggaacttcaggagaaagaagagtgaagtctactctgccgattattgcaaaatgaaaatcgaaaagatgggcctggtttttgcacttggtgggatagggggcaccagtcttcacattagaagcacaggcaaaatgagcaagactctccatgcacaactcgggttcaagaagaccttatgttacccgctgatggatatcaatgaagaccttaatcgattactctggaggagcagatgcaagatagtaagaatccaggcagttttgcagccatcagttcctcaagaattccgcatttacgacgacgtgatcataaatgatgaccaaggactattcaaagttctgtagaccgtagtgcccagcaatgcccgaaaacgacccccctcacaatgacagccagaaggcccggacaaaaaagccccctccgaaagactccacggaccaagcgagaggccagccagcagccgacggcaagcgcgaacaccaggcggccccagcacagaacagccctgacacaaggccaccaccagccaccccaatctgcatcctcctcgtgggacccccgaggaccaacccccaaggctgcccccgatccaaaccaccaaccgcatccccaccacccccgggaaagaaacccccagcaattggaaggcccctccccctcttcctcaacacaagaactccacaaccgaaccgcacaagcgaccgaggtgacccaaccgcaggcatccgactccctagacagatcctctctccccggcaaactaaacaaaacttagggccaaggaacatacacacccaacagaacccagaccccggcccacggcgccgcgcccccaacccccgacaaccagagggagcccccaaccaatcccgccggctcccccggtgcccacaggcagggacaccaacccccgaacagacccagcacccaaccatcgacaatccaagacgggggggcccccccaaaaaaaggcccccaggggccgacagccagcaccgcgaggaagcccacccaccccacacacgaccacggcaaccaaaccagaacccagaccaccctgggccaccagctcccagactcggccatcaccccgcagaaaggaaaggccacaacccgcgcaccccagccccgatccggcggggagccacccaacccgaaccagcacccaagagcgatccccgaaggacccccgaaccgcaaaggacatcagtatcccacagcctctccaagtcccccggtctcctcctcttctcgaagggaccaaaagatcaatccaccacacccgacgacactcaactccccacccctaaaggagacaccgggaatcccagaatcaagactcatccaatgtccatcatgggtctcaaggtgaacgtctctgccatattcatggcagtactgttaactctccaaacacccaccggtcaaatccattggggcaatctctctaagataggggtggtaggaataggaagtgcaagctacaaagttatgactcgttccagccatcaatcattagtcataaaattaatgcccaatataactctcctcaataactgcacgagggtagagattgcagaatacaggagactactgagaacagttttggaaccaattagagatgcacttaatgcaatgacccagaatataagaccggttcagagtgtagcttcaagtaggagacacaagagatttgcgggagtagtcctggcaggtgcggccctaggcgttgccacagctgctcagataacagccggcattgcacttcaccagtccatgctgaactctcaagccatcgacaatctgagagcgagcctggaaactactaatcaggcaattgagacaatcagacaagcagggcaggagatgatattggctgttcagggtgtccaagactacatcaataatgagctgataccgtctatgaaccaactatcttgtgatttaatcggccagaagctcgggctcaaattgctcagatactatacagaaatcctgtcattatttggccccagtttacgggaccccatatctgcggagatatctatccaggctttgagctatgcgcttggaggagacatcaataaggtgttagaaaagctcggatacagtggaggtgatttactgggcatcttagagagcggaggaataaaggcccggataactcacgtcgacacagagtcctacttcattgtcctcagtatagcctatccgacgctgtccgagattaagggggtgattgtccaccggctagagggggtctcgtacaacataggctctcaagagtggtataccactgtgcccaagtatgttgcaacccaagggtaccttatctcgaattttgatgagtcatcgtgtactttcatgccagaggggactgtgtgcagccaaaatgccttgtacccgatgagtcctctgctccaagaatgcctccgggggtacaccaagtcctgtgctcgtacactcgtatccgggtcttttgggaaccggttcattttatcacaagggaacctaatagccaattgtgcatcaatcctttgcaagtgttacacaacaggaacgatcattaatcaagaccctgacaagatcctaacatacattgctgccgatcactgcccggtagtcgaggtgaacggcgtgaccatccaagtcgggagcaggaggtatccagacgctgtgtacttgcacagaattgacctcggtcctcccatatcattggagaggttggacgtagggacaaatctggggaatgcaattgctaagttggaggatgccaaggaattgttggagtcatcggaccagatattgaggagtatgaaaggtttatcgagcactagcatagtctacatcctgattgcagtgtgtcttggagggttgatagggatccccgctttaatatgttgctgcagggggcgttgtaacaaaaagggagaacaagttggtatgtcaagaccaggcctaaagcctgatcttacgggaacatcaaaatcctatgtaaggtcgctctgatcctctacaactcttgaaacacaaatgtcccacaagtctcctcttcgtcatcaagcaaccaccgcacccagcatcaagcccacctgaaattatctccggcttccctctggccgaacaatatcggtagttaatcaaaacttagggtgcaagatcatccacaatgtcaccacaacgagaccggataaatgccttctacaaagataacccccatcccaagggaagtaggatagtcattaacagagaacatcttatgattgatagaccttatgttttgctggctgttctgtttgtcatgtttctgagcttgatcgggttgctagccattgcaggcattagacttcatcgggcagccatctacaccgcagagatccataaaagcctcagcaccaatctagatgtaactaactcaatcgagcatcaggtcaaggacgtgctgacaccactcttcaaaatcatcggtgatgaagtgggcctgaggacacctcagagattcactgacctagtgaaattaatctctgacaagattaaattccttaatccggatagggagtacgacttcagagatctcacttggtgtatcaacccgccagagagaatcaaattggattatgatcaatactgtgcagatgtggctgctgaagagctcatgaatgcattggtgaactcaactctactggagaccagaacaaccaatcagttcctagctgtctcaaagggaaactgctcagggcccactacaatcagaggtcaattctcaaacatgtcgctgtccctgttagacttgtatttaggtcgaggttacaatgtgtcatctatagtcactatgacatcccagggaatgtatgggggaacttacctagtggaaaagcctaatctgagcagcaaaaggtcagagttgtcacaactgagcatgtaccgagtgtttgaagtaggtgttatcagaaatccgggtttgggggctccggtgttccatatgacaaactatcttgagcaaccagtcagtaatgatctcagcaactgtatggtggctttgggggagctcaaactcgcagccctttgtcacggggaagattctatcacaattccctatcagggatcagggaaaggtgtcagcttccagctcgtcaagctaggtgtctggaaatccccaaccgacatgcaatcctgggtccccttatcaacggatgatccagtgatagacaggctttacctctcatctcacagaggtgttatcgctgacaatcaagcaaaatgggctgtcccgacaacacgaacagatgacaagttgcgaatggagacatgcttccaacaggcgtgtaagggtaaaatccaagcactctgcgagaatcccgagtgggcaccattgaaggataacaggattccttcatacggggtcttgtctgttgatctgagtctgacagttgagcttaaaatcaaaattgcttcgggattcgggccattgatcacacacggttcagggatggacctatacaaatccaaccacaacaatgtgtattggctgactatcccgccaatgaagaacctagccttaggtgtaatcaacacattggagtggataccgagattcaaggttagtccctacctcttcactgtcccaattaaggaagcaggcgaagactgccatgccccaacatacctacctgcggaggtggatggtgatgtcaaactcagttccaatctggtgattctacctggtcaagatctccaatatgttttggcaacctacgatacttccagggttgaacatgctgtggtttattacgtttacagcccaagccgctcattttcttacttttatccttttaggttgcctataaagggggtccccatcgaattacaagtggaatgcttcacatgggaccaaaaactctggtgccgtcacttctgtgtgcttgcggactcagaatctggtggacatatcactcactctgggatggtgggcatgggagtcagctgcacagtcacccgggaagatggaaccaatcgcagatagggctgctagtgaaccaatcacatgatgtcacccagacatcaggcatacccactagtgtgaaatagacatcagaattaagaaaaacgtagggtccaagtggttccccgttatggactcgctatctgtcaaccagatcttataccctgaagttcacctagatagcccgatagttaccaataagatagtagccatcctggagtatgctcgagtccctcacgcttacagcctggaggaccctacactgtgtcagaacatcaagcaccgcctaaaaaacggattttccaaccaaatgattataaacaatgtggaagttgggaatgtcatcaagtccaagcttaggagttatccggcccactctcatattccatatccaaattgtaatcaggatttatttaacatagaagacaaagagtcaacgaggaagatccgtgaactcctcaaaaaggggaattcgctgtactccaaagtcagtgataaggttttccaatgcttaagggacactaactcacggcttggcctaggctccgaattgagggaggacatcaaggagaaagttattaacttgggagtttacatgcacagctcccagtggtttgagccctttctgttttggtttacagtcaagactgagatgaggtcagtgattaaatcacaaacccatacttgccataggaggagacacacacctgtattcttcactggtagttcagttgagttgctaatctctcgtgaccttgttgctataatcagtaaagagtctcaacatgtatattacctgacatttgaactggttttgatgtattgtgatgtcatagaggggaggttaatgacagagaccgctatgactattgatgctaggtatacagagcttctaggaagagtcagatacatgtggaaactgatagatggtttcttccctgcactcgggaatccaacttatcaaattgtagccatgctggagcctctttcacttgcttacctgcagctgagggatataacagtagaactcagaggtgctttccttaaccactgctttactgaaatacatgatgttcttgaccaaaacgggttttctgatgaaggtacttatcatgagttaactgaagctctagattacattttcataactgatgacatacatctgacaggggagattttctcatttttcagaagtttcggccaccccagacttgaagcagtaacggctgctgaaaatgttaggaaatacatgaatcagcctaaagtcattgtgtatgagactctgatgaaaggtcatgccatattttgtggaatcataatcaacggctatcgtgacaggcacggaggcagttggccaccgctgaccctccccctgcatgctgcagacacaatccggaatgctcaagcttcaggtgaagggttaacacatgagcagtgcgttgataactggaaatcttttgctggagtgaaatttggctgctttatgcctcttagcctggatagtgatctgacaatgtacctaaaggacaaggcacttgctgctctccaaagggaatgggattcagtttacccgaaagagttcctgcgttacgaccctcccaagggaaccgggtcacggaggcttgtagatgttttccttaatgattcgagctttgacccatatgatgtgataatgtatgttgtaagtggagcttacctccatgaccctgagttcaacctgtcttacagcctgaaagaaaaggagatcaaggaaacaggtagactttttgctaaaatgacttacaaaatgagggcatgccaagtgattgctgaaaatctaatctcaaacgggattggcaaatattttaaggacaatgggatggccaaggatgagcacgatttgactaaggcactccacactctagctgtctcaggagtccccaaagatctcaaagaaagtcacaggggggggccagtcttaaaaacctactcccgaagcccagtccacacaagtaccaggaacgtgagagcagcaaaagggtttatagggttccctcaagtaattcggcaggaccaagacactgatcatccggagaatatggaagcttacgagacagtcagtgcatttatcacgactgatctcaagaagtactgccttaattggagatatgagaccatcagcttgtttgcacagaggctaaatgagatttacggattgccctcatttttccagtggctgcataagaggcttgagacctctgtcctgtatgtaagtgaccctcattgcccccccgaccttgacgcccatatcccgttatataaagtccccaatgatcaaatcttcattaagtaccctatgggaggtatagaagggtattgtcagaagctgtggaccatcagcaccattccctatctatacctggctgcttatgagagcggagtaaggattgcttcgttagtgcaaggggacaatcagaccatagccgtaacaaaaagggtacccagcacatggccctacaaccttaagaaacgggaagctgctagagtaactagagattactttgtaattcttaggcaaaggctacatgatattggccatcacctcaaggcaaatgagacaattgtttcatcacatttttttgtctattcaaaaggaatatattatgatgggctacttgtgtcccaatcactcaagagcatcgcaagatgtgtattctggtcagagactatagttgatgaaacaagggcagcatgcagtaatattgctacaacaatggctaaaagcatcgagagaggttatgaccgttaccttgcatattccctgaacgtcctaaaagtgatacagcaaattctgatctctcttggcttcacaatcaattcaaccatgacccgggatgtagtcatacccctcctcacaaacaacgacctcttaataaggatggcactgttgcccgctcctattggggggatgaattatctgaatatgagcaggctgtttgtcagaaacatcggtgatccagtaacatcatcaattgctgatctcaagagaatgattctcgcctcactaatgcctgaagagaccctccatcaagtaatgacacaacaaccgggggactcttcattcctagactgggctagcgacccttactcagcaaatcttgtatgtgtccagagcatcactagactcctcaagaacataactgcaaggtttgtcctgatccatagtccaaacccaatgttaaaaggattattccatgatgacagtaaagaagaggacgagggactggcggcattcctcatggacaggcatattatagtacctagggcagctcatgaaatcctggatcatagtgtcacaggggcaagagagtctattgcaggcatgctggataccacaaaaggcttgattcgagccagcatgaggaagggggggttaacctctcgagtgataaccagattgtccaattatgactatgaacaattcagagcagggatggtgctattgacaggaagaaagagaaatgtcctcattgacaaagagtcatgttcagtgcagctggcgagagctctaagaagccatatgtgggcgaggctagctcgaggacggcctatttacggccttgaggtccctgatgtactagaatctatgcgaggccaccttattcggcgtcatgagacatgtgtcatctgcgagtgtggatcagtcaactacggatggttttttgtcccctcgggttgccaactggatgatattgacaaggaaacatcatccttgagagtcccatatattggttctaccactgatgagagaacagacatgaagcttgccttcgtaagagccccaagtcgatccttgcgatctgctgttagaatagcaacagtgtactcatgggcttacggtgatgatgatagctcttggaacgaagcctggttgttggctaggcaaagggccaatgtgagcctggaggagctaagggtgatcactcccatctcaacttcgactaatttagcgcataggttgagggatcgtagcactcaagtgaaatactcaggtacatcccttgtccgagtggcgaggtataccacaatctccaacgacaatctctcatttgtcatatcagataagaaggttgatactaactttatataccaacaaggaatgcttctagggttgggtgttttagaaacattgtttcgactcgagaaagataccggatcatctaacacggtattacatcttcacgtcgaaacagattgttgcgtgatcccgatgatagatcatcccaggatacccagctcccgcaagctagagctgagggcagagctatgtaccaacccattgatatatgataatgcacctttaattgacagagatgcaacaaggctatacacccagagccataggaggcaccttgtggaatttgttacatggtccacaccccaactatatcacattttagctaagtccacagcactatctatgattgacctggtaacaaaatttgagaaggaccatatgaatgaaatttcagctctcataggggatgacgatatcaatagtttcataactgagtttctgctcatagagccaagattattcactatctacttgggccagtgtgcggccatcaattgggcatttgatgtacattatcatagaccatcagggaaatatcagatgggtgagctgttgtcatcgttcctttctagaatgagcaaaggagtgtttaaggtgcttgtcaatgctctaagccacccaaagatctacaagaaattctggcattgtggtattatagagcctatccatggtccttcacttgatgctcaaaacttgcacacaactgtgtgcaacatggtttacacatgctatatgacctacctcgacctgttgttgaatgaagagttagaagagttcacatttctcttgtgtgaaagcgacgaggatgtagtaccggacagattcgacaacatccaggcaaaacacttatgtgttctggcagatttgtactgtcaaccagggacctgcccaccaattcgaggtctaagaccggtagagaaatgtgcagttctaaccgaccatatcaaggcagaggctatgttatctccagcaggatcttcgtggaacataaatccaattattgtagaccattactcatgctctctgacttatctccggcgaggatcgatcaaacagataagattgagagttgatccaggattcattttcgacgccctcgctgaggtaaatgtcagtcagccaaagatcggcagcaacaacatctcaaatatgagcatcaaggctttcagacccccacacgatgatgttgcaaaattgctcaaagatatcaacacaagcaagcacaatcttcccatttcagggggcaatctcgccaattatgaaatccatgctttccgcagaatcgggttgaactcatctgcttgctacaaagctgttgagatatcaacattaattaggagatgccttgagccaggggaggacggcttgttcttgggtgagggatcgggttctatgttgatcacttataaagagatacttaaactaaacaagtgcttctataatagtggggtttccgccaattctagatctggtcaaagggaattagcaccctatccctccgaagttggccttgtcgaacacagaatgggagtaggtaatattgtcaaagtgctctttaacgggaggcccgaagtcacgtgggtaggcagtgtagattgcttcaatttcatagttagtaatatccctacctctagtgtggggtttatccattcagatatagagaccttgcctgacaaagatactatagagaagctagaggaattggcagccatcttatcgatggctctgctcctgggcaaaataggatcaatactggtgattaagcttatgcctttcagcggggattttgttcagggatttataagttatgtagggtctcattatagagaagtgaaccttgtataccctagatacagcaacttcatctctactgaatcttatttggttatgacagatctcaaggctaaccggctaatgaatcctgaaaagattaagcagcagataattgaatcatctgtgaggacttcacctggacttataggtcacatcctatccattaagcaactaagctgcatacaagcaattgtgggagacgcagttagtagaggtgatatcaatcctactctgaaaaaacttacacctatagagcaggtgctgatcaattgcgggttggcaattaacggacctaagctgtgcaaagaattgatccaccatgatgttgcctcagggcaagatggattgcttaattctatactcatcctctacagggagttggcaagattcaaagacaaccaaagaagtcaacaagggatgttccacgcttaccccgtattggtaagtagcaggcaacgagaacttatatctaggatcacccgcaaattctgggggcacattcttctttactccgggaacaaaaagttgataaataagtttatccagaatctcaagtccggctatctgatactagacttacaccagaatatcttcgttaagaatctatccaagtcagagaaacagattattatgacggggggtttgaaacgtgagtgggtttttaaggtaacagtcaaggagaccaaagaatggtataagttagtcggatacagtgccctgattaaggactaattggttgaactccggaaccctaatcctgccctaggtggttaggcattatttgcaatatattaaagaaaactttgaaaatacgaagtttctattcccagctttgtctggtggccggcatggtcccagcctcctcgctggcgccggctgggcaacattccgaggggaccgtcccctcggtaatggcgaatgggacgcggccgatccggctgctaacaaagcccgaaaggaagctgagttggctgctgccaccgctgagcaataactagcataaccccttggggcctctaaacgggtcttgaggggttttttgctgaaaggaggaactatatccggatgcggccgccatgaacaataaaactgtctgcttacataaacagtaatacaaggggtgttatgagccatattcaacgggaaacgtcgaggccgcgattaaattccaacatggatgctgatttatatgggtataaatgggctcgcgataatgtcgggcaatcaggtgcgacaatctatcgcttgtatgggaagcccgatgcgccagagttgtttctgaaacatggcaaaggtagcgttgccaatgatgttacagatgagatggtcagactaaactggctgacggaatttatgcctcttccgaccatcaagcattttatccgtactcctgatgatgcatggttactcaccactgcgatccccggaaaaacagcattccaggtattagaagaatatcctgattcaggtgaaaatattgttgatgcgctggcagtgttcctgcgccggttgcattcgattcctgtttgtaattgtccttttaacagcgatcgtgtatttcgtctcgctcaggcgcaatcacgaatgaataacggtttggttgatgcgagtgattttgatgacgagcgtaatggctggcctgttgaacaagtctggaaagaaatgcataaacttttgccattctcaccggattcagtcgtcactcatggtgatttctcacttgataaccttatttttgacgaggggaaattaataggttgtattgatgttggacgagtcggaatcgcagaccgataccaggatcttgccatcctatggaactgcctcggtgagttttctccttcattacagaaacggctttttcaaaaatatggtattgataatcctgatatgaataaattgcagtttcatttgatgctcgatgagtttttctaatcagaattggttaattggttgtaacattattcagattgggccccgttccactgagcgtcagaccccgtagaaaagatcaaaggatcttcttgagatcctttttttctgcgcgtaatctgctgcttgcaaacaaaaaaaccaccgctaccagcggtggtttgtttgccggatcaagagctaccaactctttttccgaaggtaactggcttcagcagagcgcagataccaaatactgttcttctagtgtagccgtagttaggccaccacttcaagaactctgtagcaccgcctacatacctcgctctgctaatcctgttaccagtggctgctgccagtggcgataagtcgtgtcttaccgggttggactcaagacgatagttaccggataaggcgcagcggtcgggctgaacggggggttcgtgcacacagcccagcttggagcgaacgacctacaccgaactgagatacctacagcgtgagctatgagaaagcgccacgcttcccgaagggagaaaggcggacaggtatccggtaagcggcagggtcggaacaggagagcgcacgagggagcttccagggggaaacgcctggtatctttatagtcctgtcgggtttcgccacctctgacttgagcgtcgatttttgtgatgctcgtcaggggggcggagcctatggaaaaacgccagcaacgcggcctttttacggttcctggccttttgctggccttttgctcacatgttctttcctgcgttatcccctgattctgtggataaccgtattaccgctag

SEQ ID NO: 33 - DNA, 18686 bp, Artificial sequence
  pKP-MVSchw-ATU3(eGFP)
gcgatcgctaatacgactcactatagggccaactttgtttggtctgatgagtccgtgaggacgaaacccggagtcccgggtcaccaaacaaagttgggtaaggatagttcaatcaatgatcatcttctagtgcacttaggattcaagatcctattatcagggacaagagcaggattagggatatccgagatggccacacttttaaggagcttagcattgttcaaaagaaacaaggacaaaccacccattacatcaggatccggtggagccatcagaggaatcaaacacattattatagtaccaatccctggagattcctcaattaccactcgatccagacttctggaccggttggtgaggttaattggaaacccggatgtgagcgggcccaaactaacaggggcactaataggtatattatccttatttgtggagtctccaggtcaattgattcagaggatcaccgatgaccctgacgttagcataaggctgttagaggttgtccagagtgaccagtcacaatctggccttaccttcgcatcaagaggtaccaacatggaggatgaggcggaccaatacttttcacatgatgatccaattagtagtgatcaatccaggttcggatggttcgggaacaaggaaatctcagatattgaagtgcaagaccctgagggattcaacatgattctgggtaccatcctagcccaaatttgggtcttgctcgcaaaggcggttacggccccagacacggcagctgattcggagctaagaaggtggataaagtacacccaacaaagaagggtagttggtgaatttagattggagagaaaatggttggatgtggtgaggaacaggattgccgaggacctctccttacgccgattcatggtcgctctaatcctggatatcaagagaacacccggaaacaaacccaggattgctgaaatgatatgtgacattgatacatatatcgtagaggcaggattagccagttttatcctgactattaagtttgggatagaaactatgtatcctgctcttggactgcatgaatttgctggtgagttatccacacttgagtccttgatgaacctttaccagcaaatgggggaaactgcaccctacatggtaatcctggagaactcaattcagaacaagttcagtgcaggatcataccctctgctctggagctatgccatgggagtaggagtggaacttgaaaactccatgggaggtttgaactttggccgatcttactttgatccagcatattttagattagggcaagagatggtaaggaggtcagctggaaaggtcagttccacattggcatctgaactcggtatcactgccgaggatgcaaggcttgtttcagagattgcaatgcatactactgaggacaagatcagtagagcggttggacccagacaagcccaagtatcatttctacacggtgatcaaagtgagaatgagctaccgagattggggggcaaggaagataggagggtcaaacagagtcgaggagaagccagggagagctacagagaaaccgggcccagcagagcaagtgatgcgagagctgcccatcttccaaccggcacacccctagacattgacactgcaacggagtccagccaagatccgcaggacagtcgaaggtcagctgacgccctgcttaggctgcaagccatggcaggaatctcggaagaacaaggctcagacacggacacccctatagtgtacaatgacagaaatcttctagactaggtgcgagaggccgagggccagaacaacatccgcctaccatccatcattgttataaaaaacttaggaaccaggtccacacagccgccagcccatcaaccatccactcccacgattggagccaatggcagaagagcaggcacgccatgtcaaaaacggactggaatgcatccgggctctcaaggccgagcccatcggctcactggccatcgaggaagctatggcagcatggtcagaaatatcagacaacccaggacaggagcgagccacctgcagggaagagaaggcaggcagttcgggtctcagcaaaccatgcctctcagcaattggatcaactgaaggcggtgcacctcgcatccgcggtcagggacctggagagagcgatgacgacgctgaaactttgggaatccccccaagaaatctccaggcatcaagcactgggttacagtgttattacgtttatgatcacagcggtgaagcggttaagggaatccaagatgctgactctatcatggttcaatcaggccttgatggtgatagcaccctctcaggaggagacaatgaatctgaaaacagcgatgtggatattggcgaacctgataccgagggatatgctatcactgaccggggatctgctcccatctctatggggttcagggcttctgatgttgaaactgcagaaggaggggagatccacgagctcctgagactccaatccagaggcaacaactttccgaagcttgggaaaactctcaatgttcctccgcccccggaccccggtagggccagcacttccgggacacccattaaaaagggcacagacgcgagattagcctcatttggaacggagatcgcgtctttattgacaggtggtgcaacccaatgtgctcgaaagtcaccctcggaaccatcagggccaggtgcacctgcggggaatgtccccgagtgtgtgagcaatgccgcactgatacaggagtggacacccgaatctggtaccacaatctccccgagatcccagaataatgaagaagggggagactattatgatgatgagctgttctctgatgtccaagatattaaaacagccttggccaaaatacacgaggataatcagaagataatctccaagctagaatcactgctgttattgaagggagaagttgagtcaattaagaagcagatcaacaggcaaaatatcagcatatccaccctggaaggacacctctcaagcatcatgatcgccattcctggacttgggaaggatcccaacgaccccactgcagatgtcgaaatcaatcccgacttgaaacccatcataggcagagattcaggccgagcactggccgaagttctcaagaaacccgttgccagccgacaactccaaggaatgacaaatggacggaccagttccagaggacagctgctgaaggaatttcagctaaagccgatcgggaaaaagatgagctcagccgtcgggtttgttcctgacaccggccctgcatcacgcagtgtaatccgctccattataaaatccagccggctagaggaggatcggaagcgttacctgatgactctccttgatgatatcaaaggagccaatgatcttgccaagttccaccagatgctgatgaagataataatgaagtagctacagctcaacttacctgccaaccccatgccagtcgacccaactagtacaacctaaatccattataaaaaacttaggagcaaagtgattgcctcccaaggtccacaatgacagagacctacgacttcgacaagtcggcatgggacatcaaagggtcgatcgctccgatacaacccaccacctacagtgatggcaggctggtgccccaggtcagagtcatagatcctggtctaggcgacaggaaggatgaatgctttatgtacatgtttctgctgggggttgttgaggacagcgattccctagggcctccaatcgggcgagcatttgggttcctgcccttaggtgttggcagatccacagcaaagcccgaaaaactcctcaaagaggccactgagcttgacatagttgttagacgtacagcagggctcaatgaaaaactggtgttctacaacaacaccccactaactctcctcacaccttggagaaaggtcctaacaacagggagtgtcttcaacgcaaaccaagtgtgcaatgcggttaatctgataccgctcgataccccgcagaggttccgtgttgtttatatgagcatcacccgtctttcggataacgggtattacaccgttcctagaagaatgctggaattcagatcggtcaatgcagtggccttcaacctgctggtgacccttaggattgacaaggcgataggccctgggaagatcatcgacaatacagagcaacttcctgaggcaacatttatggtccacatcgggaacttcaggagaaagaagagtgaagtctactctgccgattattgcaaaatgaaaatcgaaaagatgggcctggtttttgcacttggtgggatagggggcaccagtcttcacattagaagcacaggcaaaatgagcaagactctccatgcacaactcgggttcaagaagaccttatgttacccgctgatggatatcaatgaagaccttaatcgattactctggaggagcagatgcaagatagtaagaatccaggcagttttgcagccatcagttcctcaagaattccgcatttacgacgacgtgatcataaatgatgaccaaggactattcaaagttctgtagaccgtagtgcccagcaatgcccgaaaacgacccccctcacaatgacagccagaaggcccggacaaaaaagccccctccgaaagactccacggaccaagcgagaggccagccagcagccgacggcaagcgcgaacaccaggcggccccagcacagaacagccctgacacaaggccaccaccagccaccccaatctgcatcctcctcgtgggacccccgaggaccaacccccaaggctgcccccgatccaaaccaccaaccgcatccccaccacccccgggaaagaaacccccagcaattggaaggcccctccccctcttcctcaacacaagaactccacaaccgaaccgcacaagcgaccgaggtgacccaaccgcaggcatccgactccctagacagatcctctctccccggcaaactaaacaaaacttagggccaaggaacatacacacccaacagaacccagaccccggcccacggcgccgcgcccccaacccccgacaaccagagggagcccccaaccaatcccgccggctcccccggtgcccacaggcagggacaccaacccccgaacagacccagcacccaaccatcgacaatccaagacgggggggcccccccaaaaaaaggcccccaggggccgacagccagcaccgcgaggaagcccacccaccccacacacgaccacggcaaccaaaccagaacccagaccaccctgggccaccagctcccagactcggccatcaccccgcagaaaggaaaggccacaacccgcgcaccccagccccgatccggcggggagccacccaacccgaaccagcacccaagagcgatccccgaaggacccccgaaccgcaaaggacatcagtatcccacagcctctccaagtcccccggtctcctcctcttctcgaagggaccaaaagatcaatccaccacacccgacgacactcaactccccacccctaaaggagacaccgggaatcccagaatcaagactcatccaatgtccatcatgggtctcaaggtgaacgtctctgccatattcatggcagtactgttaactctccaaacacccaccggtcaaatccattggggcaatctctctaagataggggtggtaggaataggaagtgcaagctacaaagttatgactcgttccagccatcaatcattagtcataaaattaatgcccaatataactctcctcaataactgcacgagggtagagattgcagaatacaggagactactgagaacagttttggaaccaattagagatgcacttaatgcaatgacccagaatataagaccggttcagagtgtagcttcaagtaggagacacaagagatttgcgggagtagtcctggcaggtgcggccctaggcgttgccacagctgctcagataacagccggcattgcacttcaccagtccatgctgaactctcaagccatcgacaatctgagagcgagcctggaaactactaatcaggcaattgagacaatcagacaagcagggcaggagatgatattggctgttcagggtgtccaagactacatcaataatgagctgataccgtctatgaaccaactatcttgtgatttaatcggccagaagctcgggctcaaattgctcagatactatacagaaatcctgtcattatttggccccagtttacgggaccccatatctgcggagatatctatccaggctttgagctatgcgcttggaggagacatcaataaggtgttagaaaagctcggatacagtggaggtgatttactgggcatcttagagagcggaggaataaaggcccggataactcacgtcgacacagagtcctacttcattgtcctcagtatagcctatccgacgctgtccgagattaagggggtgattgtccaccggctagagggggtctcgtacaacataggctctcaagagtggtataccactgtgcccaagtatgttgcaacccaagggtaccttatctcgaattttgatgagtcatcgtgtactttcatgccagaggggactgtgtgcagccaaaatgccttgtacccgatgagtcctctgctccaagaatgcctccgggggtacaccaagtcctgtgctcgtacactcgtatccgggtcttttgggaaccggttcattttatcacaagggaacctaatagccaattgtgcatcaatcctttgcaagtgttacacaacaggaacgatcattaatcaagaccctgacaagatcctaacatacattgctgccgatcactgcccggtagtcgaggtgaacggcgtgaccatccaagtcgggagcaggaggtatccagacgctgtgtacttgcacagaattgacctcggtcctcccatatcattggagaggttggacgtagggacaaatctggggaatgcaattgctaagttggaggatgccaaggaattgttggagtcatcggaccagatattgaggagtatgaaaggtttatcgagcactagcatagtctacatcctgattgcagtgtgtcttggagggttgatagggatccccgctttaatatgttgctgcagggggcgttgtaacaaaaagggagaacaagttggtatgtcaagaccaggcctaaagcctgatcttacgggaacatcaaaatcctatgtaaggtcgctctgatcctctacaactcttgaaacacaaatgtcccacaagtctcctcttcgtcatcaagcaaccaccgcacccagcatcaagcccacctgaaattatctccggcttccctctggccgaacaatatcggtagttaatcaaaacttagggtgcaagatcatccacaatgtcaccacaacgagaccggataaatgccttctacaaagataacccccatcccaagggaagtaggatagtcattaacagagaacatcttatgattgatagaccttatgttttgctggctgttctgtttgtcatgtttctgagcttgatcgggttgctagccattgcaggcattagacttcatcgggcagccatctacaccgcagagatccataaaagcctcagcaccaatctagatgtaactaactcaatcgagcatcaggtcaaggacgtgctgacaccactcttcaaaatcatcggtgatgaagtgggcctgaggacacctcagagattcactgacctagtgaaattaatctctgacaagattaaattccttaatccggatagggagtacgacttcagagatctcacttggtgtatcaacccgccagagagaatcaaattggattatgatcaatactgtgcagatgtggctgctgaagagctcatgaatgcattggtgaactcaactctactggagaccagaacaaccaatcagttcctagctgtctcaaagggaaactgctcagggcccactacaatcagaggtcaattctcaaacatgtcgctgtccctgttagacttgtatttaggtcgaggttacaatgtgtcatctatagtcactatgacatcccagggaatgtatgggggaacttacctagtggaaaagcctaatctgagcagcaaaaggtcagagttgtcacaactgagcatgtaccgagtgtttgaagtaggtgttatcagaaatccgggtttgggggctccggtgttccatatgacaaactatcttgagcaaccagtcagtaatgatctcagcaactgtatggtggctttgggggagctcaaactcgcagccctttgtcacggggaagattctatcacaattccctatcagggatcagggaaaggtgtcagcttccagctcgtcaagctaggtgtctggaaatccccaaccgacatgcaatcctgggtccccttatcaacggatgatccagtgatagacaggctttacctctcatctcacagaggtgttatcgctgacaatcaagcaaaatgggctgtcccgacaacacgaacagatgacaagttgcgaatggagacatgcttccaacaggcgtgtaagggtaaaatccaagcactctgcgagaatcccgagtgggcaccattgaaggataacaggattccttcatacggggtcttgtctgttgatctgagtctgacagttgagcttaaaatcaaaattgcttcgggattcgggccattgatcacacacggttcagggatggacctatacaaatccaaccacaacaatgtgtattggctgactatcccgccaatgaagaacctagccttaggtgtaatcaacacattggagtggataccgagattcaaggttagtccctacctcttcactgtcccaattaaggaagcaggcgaagactgccatgccccaacatacctacctgcggaggtggatggtgatgtcaaactcagttccaatctggtgattctacctggtcaagatctccaatatgttttggcaacctacgatacttccagggttgaacatgctgtggtttattacgtttacagcccaagccgctcattttcttacttttatccttttaggttgcctataaagggggtccccatcgaattacaagtggaatgcttcacatgggaccaaaaactctggtgccgtcacttctgtgtgcttgcggactcagaatctggtggacatatcactcactctgggatggtgggcatgggagtcagctgcacagtcacccgggaagatggaaccaatcgcagatagggctgctagtgaaccaatcacatgatgtcacccagacatcaggcatacccactagtctaccctccatcattgttataaaaaacttaggaaccaggtccacacagccgccagcccatcaacgcgtacgatggtgagcaagggcgaggagctgttcaccggggtggtgcccatcctggtcgagctggacggcgacgtaaacggccacaagttcagcgtgtccggcgagggcgagggcgatgccacctacggcaagctgaccctgaagttcatctgcaccaccggcaagctgcccgtgccctggcccaccctcgtgaccaccctgacctacggcgtgcagtgcttcagccgctaccccgaccacatgaagcagcacgacttcttcaagtccgccatgcccgaaggctacgtccaggagcgcaccatcttcttcaaggacgacggcaactacaagacccgcgccgaggtgaagttcgagggcgacaccctggtgaaccgcatcgagctgaagggcatcgacttcaaggaggacggcaacatcctggggcacaagctggagtacaactacaacagccacaacgtctatatcatggccgacaagcagaagaacggcatcaaggtgaacttcaagatccgccacaacatcgaggacggcagcgtgcagctcgccgaccactaccagcagaacacccccatcggcgacggccccgtgctgctgcccgacaaccactacctgagcacccagtccgccctgagcaaagaccccaacgagaagcgcgatcacatggtcctgctggagttcgtgaccgccgccgggatcactctcggcatggacgagctgtacaagtaggcgcgcagcgcttagacgtctcgcgatcgatgctagtgtgaaatagacatcagaattaagaaaaacgtagggtccaagtggttccccgttatggactcgctatctgtcaaccagatcttataccctgaagttcacctagatagcccgatagttaccaataagatagtagccatcctggagtatgctcgagtccctcacgcttacagcctggaggaccctacactgtgtcagaacatcaagcaccgcctaaaaaacggattttccaaccaaatgattataaacaatgtggaagttgggaatgtcatcaagtccaagcttaggagttatccggcccactctcatattccatatccaaattgtaatcaggatttatttaacatagaagacaaagagtcaacgaggaagatccgtgaactcctcaaaaaggggaattcgctgtactccaaagtcagtgataaggttttccaatgcttaagggacactaactcacggcttggcctaggctccgaattgagggaggacatcaaggagaaagttattaacttgggagtttacatgcacagctcccagtggtttgagccctttctgttttggtttacagtcaagactgagatgaggtcagtgattaaatcacaaacccatacttgccataggaggagacacacacctgtattcttcactggtagttcagttgagttgctaatctctcgtgaccttgttgctataatcagtaaagagtctcaacatgtatattacctgacatttgaactggttttgatgtattgtgatgtcatagaggggaggttaatgacagagaccgctatgactattgatgctaggtatacagagcttctaggaagagtcagatacatgtggaaactgatagatggtttcttccctgcactcgggaatccaacttatcaaattgtagccatgctggagcctctttcacttgcttacctgcagctgagggatataacagtagaactcagaggtgctttccttaaccactgctttactgaaatacatgatgttcttgaccaaaacgggttttctgatgaaggtacttatcatgagttaactgaagctctagattacattttcataactgatgacatacatctgacaggggagattttctcatttttcagaagtttcggccaccccagacttgaagcagtaacggctgctgaaaatgttaggaaatacatgaatcagcctaaagtcattgtgtatgagactctgatgaaaggtcatgccatattttgtggaatcataatcaacggctatcgtgacaggcacggaggcagttggccaccgctgaccctccccctgcatgctgcagacacaatccggaatgctcaagcttcaggtgaagggttaacacatgagcagtgcgttgataactggaaatcttttgctggagtgaaatttggctgctttatgcctcttagcctggatagtgatctgacaatgtacctaaaggacaaggcacttgctgctctccaaagggaatgggattcagtttacccgaaagagttcctgcgttacgaccctcccaagggaaccgggtcacggaggcttgtagatgttttccttaatgattcgagctttgacccatatgatgtgataatgtatgttgtaagtggagcttacctccatgaccctgagttcaacctgtcttacagcctgaaagaaaaggagatcaaggaaacaggtagactttttgctaaaatgacttacaaaatgagggcatgccaagtgattgctgaaaatctaatctcaaacgggattggcaaatattttaaggacaatgggatggccaaggatgagcacgatttgactaaggcactccacactctagctgtctcaggagtccccaaagatctcaaagaaagtcacaggggggggccagtcttaaaaacctactcccgaagcccagtccacacaagtaccaggaacgtgagagcagcaaaagggtttatagggttccctcaagtaattcggcaggaccaagacactgatcatccggagaatatggaagcttacgagacagtcagtgcatttatcacgactgatctcaagaagtactgccttaattggagatatgagaccatcagcttgtttgcacagaggctaaatgagatttacggattgccctcatttttccagtggctgcataagaggcttgagacctctgtcctgtatgtaagtgaccctcattgcccccccgaccttgacgcccatatcccgttatataaagtccccaatgatcaaatcttcattaagtaccctatgggaggtatagaagggtattgtcagaagctgtggaccatcagcaccattccctatctatacctggctgcttatgagagcggagtaaggattgcttcgttagtgcaaggggacaatcagaccatagccgtaacaaaaagggtacccagcacatggccctacaaccttaagaaacgggaagctgctagagtaactagagattactttgtaattcttaggcaaaggctacatgatattggccatcacctcaaggcaaatgagacaattgtttcatcacatttttttgtctattcaaaaggaatatattatgatgggctacttgtgtcccaatcactcaagagcatcgcaagatgtgtattctggtcagagactatagttgatgaaacaagggcagcatgcagtaatattgctacaacaatggctaaaagcatcgagagaggttatgaccgttaccttgcatattccctgaacgtcctaaaagtgatacagcaaattctgatctctcttggcttcacaatcaattcaaccatgacccgggatgtagtcatacccctcctcacaaacaacgacctcttaataaggatggcactgttgcccgctcctattggggggatgaattatctgaatatgagcaggctgtttgtcagaaacatcggtgatccagtaacatcatcaattgctgatctcaagagaatgattctcgcctcactaatgcctgaagagaccctccatcaagtaatgacacaacaaccgggggactcttcattcctagactgggctagcgacccttactcagcaaatcttgtatgtgtccagagcatcactagactcctcaagaacataactgcaaggtttgtcctgatccatagtccaaacccaatgttaaaaggattattccatgatgacagtaaagaagaggacgagggactggcggcattcctcatggacaggcatattatagtacctagggcagctcatgaaatcctggatcatagtgtcacaggggcaagagagtctattgcaggcatgctggataccacaaaaggcttgattcgagccagcatgaggaagggggggttaacctctcgagtgataaccagattgtccaattatgactatgaacaattcagagcagggatggtgctattgacaggaagaaagagaaatgtcctcattgacaaagagtcatgttcagtgcagctggcgagagctctaagaagccatatgtgggcgaggctagctcgaggacggcctatttacggccttgaggtccctgatgtactagaatctatgcgaggccaccttattcggcgtcatgagacatgtgtcatctgcgagtgtggatcagtcaactacggatggttttttgtcccctcgggttgccaactggatgatattgacaaggaaacatcatccttgagagtcccatatattggttctaccactgatgagagaacagacatgaagcttgccttcgtaagagccccaagtcgatccttgcgatctgctgttagaatagcaacagtgtactcatgggcttacggtgatgatgatagctcttggaacgaagcctggttgttggctaggcaaagggccaatgtgagcctggaggagctaagggtgatcactcccatctcaacttcgactaatttagcgcataggttgagggatcgtagcactcaagtgaaatactcaggtacatcccttgtccgagtggcgaggtataccacaatctccaacgacaatctctcatttgtcatatcagataagaaggttgatactaactttatataccaacaaggaatgcttctagggttgggtgttttagaaacattgtttcgactcgagaaagataccggatcatctaacacggtattacatcttcacgtcgaaacagattgttgcgtgatcccgatgatagatcatcccaggatacccagctcccgcaagctagagctgagggcagagctatgtaccaacccattgatatatgataatgcacctttaattgacagagatgcaacaaggctatacacccagagccataggaggcaccttgtggaatttgttacatggtccacaccccaactatatcacattttagctaagtccacagcactatctatgattgacctggtaacaaaatttgagaaggaccatatgaatgaaatttcagctctcataggggatgacgatatcaatagtttcataactgagtttctgctcatagagccaagattattcactatctacttgggccagtgtgcggccatcaattgggcatttgatgtacattatcatagaccatcagggaaatatcagatgggtgagctgttgtcatcgttcctttctagaatgagcaaaggagtgtttaaggtgcttgtcaatgctctaagccacccaaagatctacaagaaattctggcattgtggtattatagagcctatccatggtccttcacttgatgctcaaaacttgcacacaactgtgtgcaacatggtttacacatgctatatgacctacctcgacctgttgttgaatgaagagttagaagagttcacatttctcttgtgtgaaagcgacgaggatgtagtaccggacagattcgacaacatccaggcaaaacacttatgtgttctggcagatttgtactgtcaaccagggacctgcccaccaattcgaggtctaagaccggtagagaaatgtgcagttctaaccgaccatatcaaggcagaggctatgttatctccagcaggatcttcgtggaacataaatccaattattgtagaccattactcatgctctctgacttatctccggcgaggatcgatcaaacagataagattgagagttgatccaggattcattttcgacgccctcgctgaggtaaatgtcagtcagccaaagatcggcagcaacaacatctcaaatatgagcatcaaggctttcagacccccacacgatgatgttgcaaaattgctcaaagatatcaacacaagcaagcacaatcttcccatttcagggggcaatctcgccaattatgaaatccatgctttccgcagaatcgggttgaactcatctgcttgctacaaagctgttgagatatcaacattaattaggagatgccttgagccaggggaggacggcttgttcttgggtgagggatcgggttctatgttgatcacttataaagagatacttaaactaaacaagtgcttctataatagtggggtttccgccaattctagatctggtcaaagggaattagcaccctatccctccgaagttggccttgtcgaacacagaatgggagtaggtaatattgtcaaagtgctctttaacgggaggcccgaagtcacgtgggtaggcagtgtagattgcttcaatttcatagttagtaatatccctacctctagtgtggggtttatccattcagatatagagaccttgcctgacaaagatactatagagaagctagaggaattggcagccatcttatcgatggctctgctcctgggcaaaataggatcaatactggtgattaagcttatgcctttcagcggggattttgttcagggatttataagttatgtagggtctcattatagagaagtgaaccttgtataccctagatacagcaacttcatctctactgaatcttatttggttatgacagatctcaaggctaaccggctaatgaatcctgaaaagattaagcagcagataattgaatcatctgtgaggacttcacctggacttataggtcacatcctatccattaagcaactaagctgcatacaagcaattgtgggagacgcagttagtagaggtgatatcaatcctactctgaaaaaacttacacctatagagcaggtgctgatcaattgcgggttggcaattaacggacctaagctgtgcaaagaattgatccaccatgatgttgcctcagggcaagatggattgcttaattctatactcatcctctacagggagttggcaagattcaaagacaaccaaagaagtcaacaagggatgttccacgcttaccccgtattggtaagtagcaggcaacgagaacttatatctaggatcacccgcaaattctgggggcacattcttctttactccgggaacaaaaagttgataaataagtttatccagaatctcaagtccggctatctgatactagacttacaccagaatatcttcgttaagaatctatccaagtcagagaaacagattattatgacggggggtttgaaacgtgagtgggtttttaaggtaacagtcaaggagaccaaagaatggtataagttagtcggatacagtgccctgattaaggactaattggttgaactccggaaccctaatcctgccctaggtggttaggcattatttgcaatatattaaagaaaactttgaaaatacgaagtttctattcccagctttgtctggtggccggcatggtcccagcctcctcgctggcgccggctgggcaacattccgaggggaccgtcccctcggtaatggcgaatgggacgcggccgatccggctgctaacaaagcccgaaaggaagctgagttggctgctgccaccgctgagcaataactagcataaccccttggggcctctaaacgggtcttgaggggttttttgctgaaaggaggaactatatccggatgcggccgccatgaacaataaaactgtctgcttacataaacagtaatacaaggggtgttatgagccatattcaacgggaaacgtcgaggccgcgattaaattccaacatggatgctgatttatatgggtataaatgggctcgcgataatgtcgggcaatcaggtgcgacaatctatcgcttgtatgggaagcccgatgcgccagagttgtttctgaaacatggcaaaggtagcgttgccaatgatgttacagatgagatggtcagactaaactggctgacggaatttatgcctcttccgaccatcaagcattttatccgtactcctgatgatgcatggttactcaccactgcgatccccggaaaaacagcattccaggtattagaagaatatcctgattcaggtgaaaatattgttgatgcgctggcagtgttcctgcgccggttgcattcgattcctgtttgtaattgtccttttaacagcgatcgtgtatttcgtctcgctcaggcgcaatcacgaatgaataacggtttggttgatgcgagtgattttgatgacgagcgtaatggctggcctgttgaacaagtctggaaagaaatgcataaacttttgccattctcaccggattcagtcgtcactcatggtgatttctcacttgataaccttatttttgacgaggggaaattaataggttgtattgatgttggacgagtcggaatcgcagaccgataccaggatcttgccatcctatggaactgcctcggtgagttttctccttcattacagaaacggctttttcaaaaatatggtattgataatcctgatatgaataaattgcagtttcatttgatgctcgatgagtttttctaatcagaattggttaattggttgtaacattattcagattgggccccgttccactgagcgtcagaccccgtagaaaagatcaaaggatcttcttgagatcctttttttctgcgcgtaatctgctgcttgcaaacaaaaaaaccaccgctaccagcggtggtttgtttgccggatcaagagctaccaactctttttccgaaggtaactggcttcagcagagcgcagataccaaatactgttcttctagtgtagccgtagttaggccaccacttcaagaactctgtagcaccgcctacatacctcgctctgctaatcctgttaccagtggctgctgccagtggcgataagtcgtgtcttaccgggttggactcaagacgatagttaccggataaggcgcagcggtcgggctgaacggggggttcgtgcacacagcccagcttggagcgaacgacctacaccgaactgagatacctacagcgtgagctatgagaaagcgccacgcttcccgaagggagaaaggcggacaggtatccggtaagcggcagggtcggaacaggagagcgcacgagggagcttccagggggaaacgcctggtatctttatagtcctgtcgggtttcgccacctctgacttgagcgtcgatttttgtgatgctcgtcaggggggcggagcctatggaaaaacgccagcaacgcggcctttttacggttcctggccttttgctggccttttgctcacatgttctttcctgcgttatcccctgattctgtggataaccgtattaccgctag

SEQ ID NO: 34 - DNA, 21800 bp, Artificial sequence
  pKM-ATU2-S_2019-nCoV (optimized sequence)
gcgatcgctaatacgactcactatagggccaactttgtttggtctgatgagtccgtgaggacgaaacccggagtcccgggtcaccaaacaaagttgggtaaggatagttcaatcaatgatcatcttctagtgcacttaggattcaagatcctattatcagggacaagagcaggattagggatatccgagatggccacacttttaaggagcttagcattgttcaaaagaaacaaggacaaaccacccattacatcaggatccggtggagccatcagaggaatcaaacacattattatagtaccaatccctggagattcctcaattaccactcgatccagacttctggaccggttggtgaggttaattggaaacccggatgtgagcgggcccaaactaacaggggcactaataggtatattatccttatttgtggagtctccaggtcaattgattcagaggatcaccgatgaccctgacgttagcataaggctgttagaggttgtccagagtgaccagtcacaatctggccttaccttcgcatcaagaggtaccaacatggaggatgaggcggaccaatacttttcacatgatgatccaattagtagtgatcaatccaggttcggatggttcgggaacaaggaaatctcagatattgaagtgcaagaccctgagggattcaacatgattctgggtaccatcctagcccaaatttgggtcttgctcgcaaaggcggttacggccccagacacggcagctgattcggagctaagaaggtggataaagtacacccaacaaagaagggtagttggtgaatttagattggagagaaaatggttggatgtggtgaggaacaggattgccgaggacctctccttacgccgattcatggtcgctctaatcctggatatcaagagaacacccggaaacaaacccaggattgctgaaatgatatgtgacattgatacatatatcgtagaggcaggattagccagttttatcctgactattaagtttgggatagaaactatgtatcctgctcttggactgcatgaatttgctggtgagttatccacacttgagtccttgatgaacctttaccagcaaatgggggaaactgcaccctacatggtaatcctggagaactcaattcagaacaagttcagtgcaggatcataccctctgctctggagctatgccatgggagtaggagtggaacttgaaaactccatgggaggtttgaactttggccgatcttactttgatccagcatattttagattagggcaagagatggtaaggaggtcagctggaaaggtcagttccacattggcatctgaactcggtatcactgccgaggatgcaaggcttgtttcagagattgcaatgcatactactgaggacaagatcagtagagcggttggacccagacaagcccaagtatcatttctacacggtgatcaaagtgagaatgagctaccgagattggggggcaaggaagataggagggtcaaacagagtcgaggagaagccagggagagctacagagaaaccgggcccagcagagcaagtgatgcgagagctgcccatcttccaaccggcacacccctagacattgacactgcaacggagtccagccaagatccgcaggacagtcgaaggtcagctgacgccctgcttaggctgcaagccatggcaggaatctcggaagaacaaggctcagacacggacacccctatagtgtacaatgacagaaatcttctagactaggtgcgagaggccgagggccagaacaacatccgcctaccatccatcattgttataaaaaacttaggaaccaggtccacacagccgccagcccatcaaccatccactcccacgattggagccaatggcagaagagcaggcacgccatgtcaaaaacggactggaatgcatccgggctctcaaggccgagcccatcggctcactggccatcgaggaagctatggcagcatggtcagaaatatcagacaacccaggacaggagcgagccacctgcagggaagagaaggcaggcagttcgggtctcagcaaaccatgcctctcagcaattggatcaactgaaggcggtgcacctcgcatccgcggtcagggacctggagagagcgatgacgacgctgaaactttgggaatccccccaagaaatctccaggcatcaagcactgggttacagtgttattacgtttatgatcacagcggtgaagcggttaagggaatccaagatgctgactctatcatggttcaatcaggccttgatggtgatagcaccctctcaggaggagacaatgaatctgaaaacagcgatgtggatattggcgaacctgataccgagggatatgctatcactgaccggggatctgctcccatctctatggggttcagggcttctgatgttgaaactgcagaaggaggggagatccacgagctcctgagactccaatccagaggcaacaactttccgaagcttgggaaaactctcaatgttcctccgcccccggaccccggtagggccagcacttccgggacacccattaaaaagggcacagacgcgagattagcctcatttggaacggagatcgcgtctttattgacaggtggtgcaacccaatgtgctcgaaagtcaccctcggaaccatcagggccaggtgcacctgcggggaatgtccccgagtgtgtgagcaatgccgcactgatacaggagtggacacccgaatctggtaccacaatctccccgagatcccagaataatgaagaagggggagactattatgatgatgagctgttctctgatgtccaagatattaaaacagccttggccaaaatacacgaggataatcagaagataatctccaagctagaatcactgctgttattgaagggagaagttgagtcaattaagaagcagatcaacaggcaaaatatcagcatatccaccctggaaggacacctctcaagcatcatgatcgccattcctggacttgggaaggatcccaacgaccccactgcagatgtcgaaatcaatcccgacttgaaacccatcataggcagagattcaggccgagcactggccgaagttctcaagaaacccgttgccagccgacaactccaaggaatgacaaatggacggaccagttccagaggacagctgctgaaggaatttcagctaaagccgatcgggaaaaagatgagctcagccgtcgggtttgttcctgacaccggccctgcatcacgcagtgtaatccgctccattataaaatccagccggctagaggaggatcggaagcgttacctgatgactctccttgatgatatcaaaggagccaatgatcttgccaagttccaccagatgctgatgaagataataatgaagtagctacagctcaacttacctgccaaccccatgccagtcgacccaactagcctaccctccatcattgttataaaaaacttaggaaccaggtccacacagccgccagcccatcaacgcgtacggccaccatgttcgtgtttctggtgctgctgccactggtgtccagtcagtgcgtgaacctgaccacacgaacacagctgccaccagcctacaccaatagcttcacccgcggagtgtactaccccgacaaggtgttccgcagcagcgtgctgcatagcacccaggatctgtttctgcccttcttcagcaacgtgacctggttccacgccatccacgtgtccggcaccaatggcaccaagcgcttcgataatcccgtgctgcccttcaacgatggcgtgtactttgccagcaccgagaagtccaatatcatccgcggctggatcttcggcaccacactggatagcaagacccagagcctgctgatcgtgaacaacgccaccaacgtggtcatcaaagtgtgcgagttccagttctgcaacgaccccttcctgggcgtctactaccacaagaacaacaagagctggatggaaagcgagttccgcgtgtacagcagcgccaacaactgcaccttcgagtacgtgtcccagccattcctgatggacctggaaggcaagcagggcaacttcaagaacctgcgcgagttcgtgttcaagaacatcgacggctacttcaaaatctacagcaagcacaccccaatcaacctcgtgcgcgatctgccacagggattcagtgctctggaacccctggtggatctgcccatcggcatcaacattacccgctttcagacactgctggccctgcaccgcagttacttgacaccaggcgatagcagcagtggatggacagctggtgccgccgcttactacgttggatatctgcagccacgcacctttctgctgaagtacaacgagaacggcaccatcaccgacgccgtggattgtgctctcgatcccctgagcgagacaaagtgcaccctgaagtccttcaccgtcgagaagggcatctaccagaccagcaatttccgcgtgcagcccaccgagagcatcgtgcgcttccccaatatcaccaatctgtgccccttcggcgaggtgttcaatgccacacgctttgcctccgtgtacgcctggaatcgcaagcgcattagcaactgcgtggccgactactccgtgctgtacaatagcgccagcttcagcaccttcaagtgctacggcgtgtcacccaccaagctgaacgacctgtgcttcaccaatgtgtacgccgacagcttcgtgatccgcggagatgaagtgcgacagattgccccaggccagaccggcaagatcgccgactacaattacaagctgcccgacgacttcaccggctgcgtgatcgcctggaacagcaacaacctggattccaaagtcggcggcaactacaactacctgtaccgcctgttccgcaagagcaatctgaagcccttcgagcgcgacatcagcaccgaaatctaccaggccggaagcaccccatgcaacggcgtggaaggcttcaactgctacttcccactgcagtcctacggatttcagcccacaaatggcgtgggctaccagccatatcgagtggtggtgctgagcttcgaactgctgcatgctccagctaccgtgtgcggccccaagaagagtaccaacctggtcaagaacaaatgcgtgaacttcaacttcaacggcctgaccggaaccggcgtgctgaccgagagtaacaagaagttcctgccattccagcagtttggccgcgacattgccgatacaaccgatgccgttcgcgatccccagaccttggagatcctggatattaccccatgctccttcggcggcgtgtccgtgattacaccaggcaccaataccagcaaccaggtggccgttctgtaccaggatgtgaattgcacagaggtgcccgtggccattcacgccgatcaattgacaccaacatggcgcgtgtactccaccggcagcaatgtgtttcaaacccgcgctggatgcctgattggagccgagcacgtgaacaatagctacgagtgcgatatccccatcggagccggaatctgcgcctcctatcagacccagaccaatagtccacgacgagcccgaagtgtggccagccagagcatcattgcctataccatgagcctgggcgccgagaatagcgtggcctactccaacaacagcattgctatccccaccaacttcaccatcagcgtgaccaccgagatcctgccagtgtccatgaccaagaccagcgtggactgcaccatgtacatctgcggagatagcaccgagtgcagcaacctgctgctgcagtacggaagtttctgcacccagctgaatcgcgccctgacaggcattgccgtggaacaggataagaacacccaagaggtgttcgcccaagtgaagcaaatctacaagaccccaccaatcaaggatttcggcggcttcaatttcagccagattctgcccgatccaagcaagcccagcaagcgcagcttcatcgaggacctgctgttcaacaaagtgacactggccgacgccggattcatcaagcagtatggcgattgcctgggcgatattgccgcacgcgatctgatttgcgcccagaagtttaacggactgaccgtcctgccaccactgctgacagatgagatgatcgcccagtacacaagtgccctgctggccggaaccattaccagcggatggacatttggagccggtgccgctctgcagattcccttcgctatgcagatggcctaccgcttcaatggcattggcgtgacccagaatgtgctgtacgagaaccagaagctgatcgccaaccagttcaacagcgccatcggcaagattcaggacagcctgagtagtaccgccagcgctctgggaaagctgcaggatgtggtcaaccagaacgctcaggccctgaacaccctggttaagcagctgagcagcaacttcggcgccatcagtagcgtgctgaacgatatcctgagccgcctggataaggtggaagccgaggtgcagatcgatcgcctgattaccggacgcctgcagtccctgcagacctatgtgacacagcagctgatccgagccgccgagattcgagctagtgctaatctggccgccaccaagatgagcgaatgtgtgctgggacagagcaagcgcgtggacttttgcggcaagggataccacctgatgagcttcccacagagtgctccacacggcgtggtgtttctgcatgtgacctacgtgcccgctcaagagaagaatttcaccaccgctccagccatctgccacgacggaaaggcccattttccacgcgagggcgtgttcgttagcaacggcactcattggttcgtcacccagcgcaacttctacgagccccagatcatcaccaccgacaacaccttcgtcagcggcaactgcgacgtcgtgatcggcattgtgaacaacaccgtgtacgatccactgcagcccgagctggacagcttcaaagaggaactggacaagtactttaagaaccacacaagccccgacgtggacctgggagacattagcggaatcaacgccagcgtggtcaacatccagaaagagattgaccgcctgaacgaggtggccaagaatctgaacgagagcctgatcgacctgcaagaactgggcaaatacgagcagtacattaagtggccctggtacatctggctgggcttcattgccggactgattgccatcgtgatggtcaccattatgctgtgctgcatgaccagttgctgcagctgcctgaagggatgctgcagttgcggaagctgctgcaagttcgacgaggatgatagcgagccagtgctgaagggcgtcaagctgcactacacctgataacgagcgcgcagcgcttagacgtctcgcgatcgatactagtacaacctaaatccattataaaaaacttaggagcaaagtgattgcctcccaaggtccacaatgacagagacctacgacttcgacaagtcggcatgggacatcaaagggtcgatcgctccgatacaacccaccacctacagtgatggcaggctggtgccccaggtcagagtcatagatcctggtctaggcgacaggaaggatgaatgctttatgtacatgtttctgctgggggttgttgaggacagcgattccctagggcctccaatcgggcgagcatttgggttcctgcccttaggtgttggcagatccacagcaaagcccgaaaaactcctcaaagaggccactgagcttgacatagttgttagacgtacagcagggctcaatgaaaaactggtgttctacaacaacaccccactaactctcctcacaccttggagaaaggtcctaacaacagggagtgtcttcaacgcaaaccaagtgtgcaatgcggttaatctgataccgctcgataccccgcagaggttccgtgttgtttatatgagcatcacccgtctttcggataacgggtattacaccgttcctagaagaatgctggaattcagatcggtcaatgcagtggccttcaacctgctggtgacccttaggattgacaaggcgataggccctgggaagatcatcgacaatacagagcaacttcctgaggcaacatttatggtccacatcgggaacttcaggagaaagaagagtgaagtctactctgccgattattgcaaaatgaaaatcgaaaagatgggcctggtttttgcacttggtgggatagggggcaccagtcttcacattagaagcacaggcaaaatgagcaagactctccatgcacaactcgggttcaagaagaccttatgttacccgctgatggatatcaatgaagaccttaatcgattactctggaggagcagatgcaagatagtaagaatccaggcagttttgcagccatcagttcctcaagaattccgcatttacgacgacgtgatcataaatgatgaccaaggactattcaaagttctgtagaccgtagtgcccagcaatgcccgaaaacgacccccctcacaatgacagccagaaggcccggacaaaaaagccccctccgaaagactccacggaccaagcgagaggccagccagcagccgacggcaagcgcgaacaccaggcggccccagcacagaacagccctgacacaaggccaccaccagccaccccaatctgcatcctcctcgtgggacccccgaggaccaacccccaaggctgcccccgatccaaaccaccaaccgcatccccaccacccccgggaaagaaacccccagcaattggaaggcccctccccctcttcctcaacacaagaactccacaaccgaaccgcacaagcgaccgaggtgacccaaccgcaggcatccgactccctagacagatcctctctccccggcaaactaaacaaaacttagggccaaggaacatacacacccaacagaacccagaccccggcccacggcgccgcgcccccaacccccgacaaccagagggagcccccaaccaatcccgccggctcccccggtgcccacaggcagggacaccaacccccgaacagacccagcacccaaccatcgacaatccaagacgggggggcccccccaaaaaaaggcccccaggggccgacagccagcaccgcgaggaagcccacccaccccacacacgaccacggcaaccaaaccagaacccagaccaccctgggccaccagctcccagactcggccatcaccccgcagaaaggaaaggccacaacccgcgcaccccagccccgatccggcggggagccacccaacccgaaccagcacccaagagcgatccccgaaggacccccgaaccgcaaaggacatcagtatcccacagcctctccaagtcccccggtctcctcctcttctcgaagggaccaaaagatcaatccaccacacccgacgacactcaactccccacccctaaaggagacaccgggaatcccagaatcaagactcatccaatgtccatcatgggtctcaaggtgaacgtctctgccatattcatggcagtactgttaactctccaaacacccaccggtcaaatccattggggcaatctctctaagataggggtggtaggaataggaagtgcaagctacaaagttatgactcgttccagccatcaatcattagtcataaaattaatgcccaatataactctcctcaataactgcacgagggtagagattgcagaatacaggagactactgagaacagttttggaaccaattagagatgcacttaatgcaatgacccagaatataagaccggttcagagtgtagcttcaagtaggagacacaagagatttgcgggagtagtcctggcaggtgcggccctaggcgttgccacagctgctcagataacagccggcattgcacttcaccagtccatgctgaactctcaagccatcgacaatctgagagcgagcctggaaactactaatcaggcaattgagacaatcagacaagcagggcaggagatgatattggctgttcagggtgtccaagactacatcaataatgagctgataccgtctatgaaccaactatcttgtgatttaatcggccagaagctcgggctcaaattgctcagatactatacagaaatcctgtcattatttggccccagtttacgggaccccatatctgcggagatatctatccaggctttgagctatgcgcttggaggagacatcaataaggtgttagaaaagctcggatacagtggaggtgatttactgggcatcttagagagcggaggaataaaggcccggataactcacgtcgacacagagtcctacttcattgtcctcagtatagcctatccgacgctgtccgagattaagggggtgattgtccaccggctagagggggtctcgtacaacataggctctcaagagtggtataccactgtgcccaagtatgttgcaacccaagggtaccttatctcgaattttgatgagtcatcgtgtactttcatgccagaggggactgtgtgcagccaaaatgccttgtacccgatgagtcctctgctccaagaatgcctccgggggtacaccaagtcctgtgctcgtacactcgtatccgggtcttttgggaaccggttcattttatcacaagggaacctaatagccaattgtgcatcaatcctttgcaagtgttacacaacaggaacgatcattaatcaagaccctgacaagatcctaacatacattgctgccgatcactgcccggtagtcgaggtgaacggcgtgaccatccaagtcgggagcaggaggtatccagacgctgtgtacttgcacagaattgacctcggtcctcccatatcattggagaggttggacgtagggacaaatctggggaatgcaattgctaagttggaggatgccaaggaattgttggagtcatcggaccagatattgaggagtatgaaaggtttatcgagcactagcatagtctacatcctgattgcagtgtgtcttggagggttgatagggatccccgctttaatatgttgctgcagggggcgttgtaacaaaaagggagaacaagttggtatgtcaagaccaggcctaaagcctgatcttacgggaacatcaaaatcctatgtaaggtcgctctgatcctctacaactcttgaaacacaaatgtcccacaagtctcctcttcgtcatcaagcaaccaccgcacccagcatcaagcccacctgaaattatctccggcttccctctggccgaacaatatcggtagttaatcaaaacttagggtgcaagatcatccacaatgtcaccacaacgagaccggataaatgccttctacaaagataacccccatcccaagggaagtaggatagtcattaacagagaacatcttatgattgatagaccttatgttttgctggctgttctgtttgtcatgtttctgagcttgatcgggttgctagccattgcaggcattagacttcatcgggcagccatctacaccgcagagatccataaaagcctcagcaccaatctagatgtaactaactcaatcgagcatcaggtcaaggacgtgctgacaccactcttcaaaatcatcggtgatgaagtgggcctgaggacacctcagagattcactgacctagtgaaattaatctctgacaagattaaattccttaatccggatagggagtacgacttcagagatctcacttggtgtatcaacccgccagagagaatcaaattggattatgatcaatactgtgcagatgtggctgctgaagagctcatgaatgcattggtgaactcaactctactggagaccagaacaaccaatcagttcctagctgtctcaaagggaaactgctcagggcccactacaatcagaggtcaattctcaaacatgtcgctgtccctgttagacttgtatttaggtcgaggttacaatgtgtcatctatagtcactatgacatcccagggaatgtatgggggaacttacctagtggaaaagcctaatctgagcagcaaaaggtcagagttgtcacaactgagcatgtaccgagtgtttgaagtaggtgttatcagaaatccgggtttgggggctccggtgttccatatgacaaactatcttgagcaaccagtcagtaatgatctcagcaactgtatggtggctttgggggagctcaaactcgcagccctttgtcacggggaagattctatcacaattccctatcagggatcagggaaaggtgtcagcttccagctcgtcaagctaggtgtctggaaatccccaaccgacatgcaatcctgggtccccttatcaacggatgatccagtgatagacaggctttacctctcatctcacagaggtgttatcgctgacaatcaagcaaaatgggctgtcccgacaacacgaacagatgacaagttgcgaatggagacatgcttccaacaggcgtgtaagggtaaaatccaagcactctgcgagaatcccgagtgggcaccattgaaggataacaggattccttcatacggggtcttgtctgttgatctgagtctgacagttgagcttaaaatcaaaattgcttcgggattcgggccattgatcacacacggttcagggatggacctatacaaatccaaccacaacaatgtgtattggctgactatcccgccaatgaagaacctagccttaggtgtaatcaacacattggagtggataccgagattcaaggttagtccctacctcttcactgtcccaattaaggaagcaggcgaagactgccatgccccaacatacctacctgcggaggtggatggtgatgtcaaactcagttccaatctggtgattctacctggtcaagatctccaatatgttttggcaacctacgatacttccagggttgaacatgctgtggtttattacgtttacagcccaagccgctcattttcttacttttatccttttaggttgcctataaagggggtccccatcgaattacaagtggaatgcttcacatgggaccaaaaactctggtgccgtcacttctgtgtgcttgcggactcagaatctggtggacatatcactcactctgggatggtgggcatgggagtcagctgcacagtcacccgggaagatggaaccaatcgcagatagggctgctagtgaaccaatcacatgatgtcacccagacatcaggcatacccactagtgtgaaatagacatcagaattaagaaaaacgtagggtccaagtggttccccgttatggactcgctatctgtcaaccagatcttataccctgaagttcacctagatagcccgatagttaccaataagatagtagccatcctggagtatgctcgagtccctcacgcttacagcctggaggaccctacactgtgtcagaacatcaagcaccgcctaaaaaacggattttccaaccaaatgattataaacaatgtggaagttgggaatgtcatcaagtccaagcttaggagttatccggcccactctcatattccatatccaaattgtaatcaggatttatttaacatagaagacaaagagtcaacgaggaagatccgtgaactcctcaaaaaggggaattcgctgtactccaaagtcagtgataaggttttccaatgcttaagggacactaactcacggcttggcctaggctccgaattgagggaggacatcaaggagaaagttattaacttgggagtttacatgcacagctcccagtggtttgagccctttctgttttggtttacagtcaagactgagatgaggtcagtgattaaatcacaaacccatacttgccataggaggagacacacacctgtattcttcactggtagttcagttgagttgctaatctctcgtgaccttgttgctataatcagtaaagagtctcaacatgtatattacctgacatttgaactggttttgatgtattgtgatgtcatagaggggaggttaatgacagagaccgctatgactattgatgctaggtatacagagcttctaggaagagtcagatacatgtggaaactgatagatggtttcttccctgcactcgggaatccaacttatcaaattgtagccatgctggagcctctttcacttgcttacctgcagctgagggatataacagtagaactcagaggtgctttccttaaccactgctttactgaaatacatgatgttcttgaccaaaacgggttttctgatgaaggtacttatcatgagttaactgaagctctagattacattttcataactgatgacatacatctgacaggggagattttctcatttttcagaagtttcggccaccccagacttgaagcagtaacggctgctgaaaatgttaggaaatacatgaatcagcctaaagtcattgtgtatgagactctgatgaaaggtcatgccatattttgtggaatcataatcaacggctatcgtgacaggcacggaggcagttggccaccgctgaccctccccctgcatgctgcagacacaatccggaatgctcaagcttcaggtgaagggttaacacatgagcagtgcgttgataactggaaatcttttgctggagtgaaatttggctgctttatgcctcttagcctggatagtgatctgacaatgtacctaaaggacaaggcacttgctgctctccaaagggaatgggattcagtttacccgaaagagttcctgcgttacgaccctcccaagggaaccgggtcacggaggcttgtagatgttttccttaatgattcgagctttgacccatatgatgtgataatgtatgttgtaagtggagcttacctccatgaccctgagttcaacctgtcttacagcctgaaagaaaaggagatcaaggaaacaggtagactttttgctaaaatgacttacaaaatgagggcatgccaagtgattgctgaaaatctaatctcaaacgggattggcaaatattttaaggacaatgggatggccaaggatgagcacgatttgactaaggcactccacactctagctgtctcaggagtccccaaagatctcaaagaaagtcacaggggggggccagtcttaaaaacctactcccgaagcccagtccacacaagtaccaggaacgtgagagcagcaaaagggtttatagggttccctcaagtaattcggcaggaccaagacactgatcatccggagaatatggaagcttacgagacagtcagtgcatttatcacgactgatctcaagaagtactgccttaattggagatatgagaccatcagcttgtttgcacagaggctaaatgagatttacggattgccctcatttttccagtggctgcataagaggcttgagacctctgtcctgtatgtaagtgaccctcattgcccccccgaccttgacgcccatatcccgttatataaagtccccaatgatcaaatcttcattaagtaccctatgggaggtatagaagggtattgtcagaagctgtggaccatcagcaccattccctatctatacctggctgcttatgagagcggagtaaggattgcttcgttagtgcaaggggacaatcagaccatagccgtaacaaaaagggtacccagcacatggccctacaaccttaagaaacgggaagctgctagagtaactagagattactttgtaattcttaggcaaaggctacatgatattggccatcacctcaaggcaaatgagacaattgtttcatcacatttttttgtctattcaaaaggaatatattatgatgggctacttgtgtcccaatcactcaagagcatcgcaagatgtgtattctggtcagagactatagttgatgaaacaagggcagcatgcagtaatattgctacaacaatggctaaaagcatcgagagaggttatgaccgttaccttgcatattccctgaacgtcctaaaagtgatacagcaaattctgatctctcttggcttcacaatcaattcaaccatgacccgggatgtagtcatacccctcctcacaaacaacgacctcttaataaggatggcactgttgcccgctcctattggggggatgaattatctgaatatgagcaggctgtttgtcagaaacatcggtgatccagtaacatcatcaattgctgatctcaagagaatgattctcgcctcactaatgcctgaagagaccctccatcaagtaatgacacaacaaccgggggactcttcattcctagactgggctagcgacccttactcagcaaatcttgtatgtgtccagagcatcactagactcctcaagaacataactgcaaggtttgtcctgatccatagtccaaacccaatgttaaaaggattattccatgatgacagtaaagaagaggacgagggactggcggcattcctcatggacaggcatattatagtacctagggcagctcatgaaatcctggatcatagtgtcacaggggcaagagagtctattgcaggcatgctggataccacaaaaggcttgattcgagccagcatgaggaagggggggttaacctctcgagtgataaccagattgtccaattatgactatgaacaattcagagcagggatggtgctattgacaggaagaaagagaaatgtcctcattgacaaagagtcatgttcagtgcagctggcgagagctctaagaagccatatgtgggcgaggctagctcgaggacggcctatttacggccttgaggtccctgatgtactagaatctatgcgaggccaccttattcggcgtcatgagacatgtgtcatctgcgagtgtggatcagtcaactacggatggttttttgtcccctcgggttgccaactggatgatattgacaaggaaacatcatccttgagagtcccatatattggttctaccactgatgagagaacagacatgaagcttgccttcgtaagagccccaagtcgatccttgcgatctgctgttagaatagcaacagtgtactcatgggcttacggtgatgatgatagctcttggaacgaagcctggttgttggctaggcaaagggccaatgtgagcctggaggagctaagggtgatcactcccatctcaacttcgactaatttagcgcataggttgagggatcgtagcactcaagtgaaatactcaggtacatcccttgtccgagtggcgaggtataccacaatctccaacgacaatctctcatttgtcatatcagataagaaggttgatactaactttatataccaacaaggaatgcttctagggttgggtgttttagaaacattgtttcgactcgagaaagataccggatcatctaacacggtattacatcttcacgtcgaaacagattgttgcgtgatcccgatgatagatcatcccaggatacccagctcccgcaagctagagctgagggcagagctatgtaccaacccattgatatatgataatgcacctttaattgacagagatgcaacaaggctatacacccagagccataggaggcaccttgtggaatttgttacatggtccacaccccaactatatcacattttagctaagtccacagcactatctatgattgacctggtaacaaaatttgagaaggaccatatgaatgaaatttcagctctcataggggatgacgatatcaatagtttcataactgagtttctgctcatagagccaagattattcactatctacttgggccagtgtgcggccatcaattgggcatttgatgtacattatcatagaccatcagggaaatatcagatgggtgagctgttgtcatcgttcctttctagaatgagcaaaggagtgtttaaggtgcttgtcaatgctctaagccacccaaagatctacaagaaattctggcattgtggtattatagagcctatccatggtccttcacttgatgctcaaaacttgcacacaactgtgtgcaacatggtttacacatgctatatgacctacctcgacctgttgttgaatgaagagttagaagagttcacatttctcttgtgtgaaagcgacgaggatgtagtaccggacagattcgacaacatccaggcaaaacacttatgtgttctggcagatttgtactgtcaaccagggacctgcccaccaattcgaggtctaagaccggtagagaaatgtgcagttctaaccgaccatatcaaggcagaggctatgttatctccagcaggatcttcgtggaacataaatccaattattgtagaccattactcatgctctctgacttatctccggcgaggatcgatcaaacagataagattgagagttgatccaggattcattttcgacgccctcgctgaggtaaatgtcagtcagccaaagatcggcagcaacaacatctcaaatatgagcatcaaggctttcagacccccacacgatgatgttgcaaaattgctcaaagatatcaacacaagcaagcacaatcttcccatttcagggggcaatctcgccaattatgaaatccatgctttccgcagaatcgggttgaactcatctgcttgctacaaagctgttgagatatcaacattaattaggagatgccttgagccaggggaggacggcttgttcttgggtgagggatcgggttctatgttgatcacttataaagagatacttaaactaaacaagtgcttctataatagtggggtttccgccaattctagatctggtcaaagggaattagcaccctatccctccgaagttggccttgtcgaacacagaatgggagtaggtaatattgtcaaagtgctctttaacgggaggcccgaagtcacgtgggtaggcagtgtagattgcttcaatttcatagttagtaatatccctacctctagtgtggggtttatccattcagatatagagaccttgcctgacaaagatactatagagaagctagaggaattggcagccatcttatcgatggctctgctcctgggcaaaataggatcaatactggtgattaagcttatgcctttcagcggggattttgttcagggatttataagttatgtagggtctcattatagagaagtgaaccttgtataccctagatacagcaacttcatctctactgaatcttatttggttatgacagatctcaaggctaaccggctaatgaatcctgaaaagattaagcagcagataattgaatcatctgtgaggacttcacctggacttataggtcacatcctatccattaagcaactaagctgcatacaagcaattgtgggagacgcagttagtagaggtgatatcaatcctactctgaaaaaacttacacctatagagcaggtgctgatcaattgcgggttggcaattaacggacctaagctgtgcaaagaattgatccaccatgatgttgcctcagggcaagatggattgcttaattctatactcatcctctacagggagttggcaagattcaaagacaaccaaagaagtcaacaagggatgttccacgcttaccccgtattggtaagtagcaggcaacgagaacttatatctaggatcacccgcaaattctgggggcacattcttctttactccgggaacaaaaagttgataaataagtttatccagaatctcaagtccggctatctgatactagacttacaccagaatatcttcgttaagaatctatccaagtcagagaaacagattattatgacggggggtttgaaacgtgagtgggtttttaaggtaacagtcaaggagaccaaagaatggtataagttagtcggatacagtgccctgattaaggactaattggttgaactccggaaccctaatcctgccctaggtggttaggcattatttgcaatatattaaagaaaactttgaaaatacgaagtttctattcccagctttgtctggtggccggcatggtcccagcctcctcgctggcgccggctgggcaacattccgaggggaccgtcccctcggtaatggcgaatgggacgcggccgatccggctgctaacaaagcccgaaaggaagctgagttggctgctgccaccgctgagcaataactagcataaccccttggggcctctaaacgggtcttgaggggttttttgctgaaaggaggaactatatccggatgcggccgccatgaacaataaaactgtctgcttacataaacagtaatacaaggggtgttatgagccatattcaacgggaaacgtcgaggccgcgattaaattccaacatggatgctgatttatatgggtataaatgggctcgcgataatgtcgggcaatcaggtgcgacaatctatcgcttgtatgggaagcccgatgcgccagagttgtttctgaaacatggcaaaggtagcgttgccaatgatgttacagatgagatggtcagactaaactggctgacggaatttatgcctcttccgaccatcaagcattttatccgtactcctgatgatgcatggttactcaccactgcgatccccggaaaaacagcattccaggtattagaagaatatcctgattcaggtgaaaatattgttgatgcgctggcagtgttcctgcgccggttgcattcgattcctgtttgtaattgtccttttaacagcgatcgtgtatttcgtctcgctcaggcgcaatcacgaatgaataacggtttggttgatgcgagtgattttgatgacgagcgtaatggctggcctgttgaacaagtctggaaagaaatgcataaacttttgccattctcaccggattcagtcgtcactcatggtgatttctcacttgataaccttatttttgacgaggggaaattaataggttgtattgatgttggacgagtcggaatcgcagaccgataccaggatcttgccatcctatggaactgcctcggtgagttttctccttcattacagaaacggctttttcaaaaatatggtattgataatcctgatatgaataaattgcagtttcatttgatgctcgatgagtttttctaatcagaattggttaattggttgtaacattattcagattgggccccgttccactgagcgtcagaccccgtagaaaagatcaaaggatcttcttgagatcctttttttctgcgcgtaatctgctgcttgcaaacaaaaaaaccaccgctaccagcggtggtttgtttgccggatcaagagctaccaactctttttccgaaggtaactggcttcagcagagcgcagataccaaatactgttcttctagtgtagccgtagttaggccaccacttcaagaactctgtagcaccgcctacatacctcgctctgctaatcctgttaccagtggctgctgccagtggcgataagtcgtgtcttaccgggttggactcaagacgatagttaccggataaggcgcagcggtcgggctgaacggggggttcgtgcacacagcccagcttggagcgaacgacctacaccgaactgagatacctacagcgtgagctatgagaaagcgccacgcttcccgaagggagaaaggcggacaggtatccggtaagcggcagggtcggaacaggagagcgcacgagggagcttccagggggaaacgcctggtatctttatagtcctgtcgggtttcgccacctctgacttgagcgtcgatttttgtgatgctcgtcaggggggcggagcctatggaaaaacgccagcaacgcggcctttttacggttcctggccttttgctggccttttgctcacatgttctttcctgcgttatcccctgattctgtggataaccgtattaccgctag

SEQ ID NO: 35 - DNA, 21800 bp, Artificial sequence
  pKM-ATU3-S_2019-nCoV (optimized sequence)
gcgatcgctaatacgactcactatagggccaactttgtttggtctgatgagtccgtgaggacgaaacccggagtcccgggtcaccaaacaaagttgggtaaggatagttcaatcaatgatcatcttctagtgcacttaggattcaagatcctattatcagggacaagagcaggattagggatatccgagatggccacacttttaaggagcttagcattgttcaaaagaaacaaggacaaaccacccattacatcaggatccggtggagccatcagaggaatcaaacacattattatagtaccaatccctggagattcctcaattaccactcgatccagacttctggaccggttggtgaggttaattggaaacccggatgtgagcgggcccaaactaacaggggcactaataggtatattatccttatttgtggagtctccaggtcaattgattcagaggatcaccgatgaccctgacgttagcataaggctgttagaggttgtccagagtgaccagtcacaatctggccttaccttcgcatcaagaggtaccaacatggaggatgaggcggaccaatacttttcacatgatgatccaattagtagtgatcaatccaggttcggatggttcgggaacaaggaaatctcagatattgaagtgcaagaccctgagggattcaacatgattctgggtaccatcctagcccaaatttgggtcttgctcgcaaaggcggttacggccccagacacggcagctgattcggagctaagaaggtggataaagtacacccaacaaagaagggtagttggtgaatttagattggagagaaaatggttggatgtggtgaggaacaggattgccgaggacctctccttacgccgattcatggtcgctctaatcctggatatcaagagaacacccggaaacaaacccaggattgctgaaatgatatgtgacattgatacatatatcgtagaggcaggattagccagttttatcctgactattaagtttgggatagaaactatgtatcctgctcttggactgcatgaatttgctggtgagttatccacacttgagtccttgatgaacctttaccagcaaatgggggaaactgcaccctacatggtaatcctggagaactcaattcagaacaagttcagtgcaggatcataccctctgctctggagctatgccatgggagtaggagtggaacttgaaaactccatgggaggtttgaactttggccgatcttactttgatccagcatattttagattagggcaagagatggtaaggaggtcagctggaaaggtcagttccacattggcatctgaactcggtatcactgccgaggatgcaaggcttgtttcagagattgcaatgcatactactgaggacaagatcagtagagcggttggacccagacaagcccaagtatcatttctacacggtgatcaaagtgagaatgagctaccgagattggggggcaaggaagataggagggtcaaacagagtcgaggagaagccagggagagctacagagaaaccgggcccagcagagcaagtgatgcgagagctgcccatcttccaaccggcacacccctagacattgacactgcaacggagtccagccaagatccgcaggacagtcgaaggtcagctgacgccctgcttaggctgcaagccatggcaggaatctcggaagaacaaggctcagacacggacacccctatagtgtacaatgacagaaatcttctagactaggtgcgagaggccgagggccagaacaacatccgcctaccatccatcattgttataaaaaacttaggaaccaggtccacacagccgccagcccatcaaccatccactcccacgattggagccaatggcagaagagcaggcacgccatgtcaaaaacggactggaatgcatccgggctctcaaggccgagcccatcggctcactggccatcgaggaagctatggcagcatggtcagaaatatcagacaacccaggacaggagcgagccacctgcagggaagagaaggcaggcagttcgggtctcagcaaaccatgcctctcagcaattggatcaactgaaggcggtgcacctcgcatccgcggtcagggacctggagagagcgatgacgacgctgaaactttgggaatccccccaagaaatctccaggcatcaagcactgggttacagtgttattacgtttatgatcacagcggtgaagcggttaagggaatccaagatgctgactctatcatggttcaatcaggccttgatggtgatagcaccctctcaggaggagacaatgaatctgaaaacagcgatgtggatattggcgaacctgataccgagggatatgctatcactgaccggggatctgctcccatctctatggggttcagggcttctgatgttgaaactgcagaaggaggggagatccacgagctcctgagactccaatccagaggcaacaactttccgaagcttgggaaaactctcaatgttcctccgcccccggaccccggtagggccagcacttccgggacacccattaaaaagggcacagacgcgagattagcctcatttggaacggagatcgcgtctttattgacaggtggtgcaacccaatgtgctcgaaagtcaccctcggaaccatcagggccaggtgcacctgcggggaatgtccccgagtgtgtgagcaatgccgcactgatacaggagtggacacccgaatctggtaccacaatctccccgagatcccagaataatgaagaagggggagactattatgatgatgagctgttctctgatgtccaagatattaaaacagccttggccaaaatacacgaggataatcagaagataatctccaagctagaatcactgctgttattgaagggagaagttgagtcaattaagaagcagatcaacaggcaaaatatcagcatatccaccctggaaggacacctctcaagcatcatgatcgccattcctggacttgggaaggatcccaacgaccccactgcagatgtcgaaatcaatcccgacttgaaacccatcataggcagagattcaggccgagcactggccgaagttctcaagaaacccgttgccagccgacaactccaaggaatgacaaatggacggaccagttccagaggacagctgctgaaggaatttcagctaaagccgatcgggaaaaagatgagctcagccgtcgggtttgttcctgacaccggccctgcatcacgcagtgtaatccgctccattataaaatccagccggctagaggaggatcggaagcgttacctgatgactctccttgatgatatcaaaggagccaatgatcttgccaagttccaccagatgctgatgaagataataatgaagtagctacagctcaacttacctgccaaccccatgccagtcgacccaactagtacaacctaaatccattataaaaaacttaggagcaaagtgattgcctcccaaggtccacaatgacagagacctacgacttcgacaagtcggcatgggacatcaaagggtcgatcgctccgatacaacccaccacctacagtgatggcaggctggtgccccaggtcagagtcatagatcctggtctaggcgacaggaaggatgaatgctttatgtacatgtttctgctgggggttgttgaggacagcgattccctagggcctccaatcgggcgagcatttgggttcctgcccttaggtgttggcagatccacagcaaagcccgaaaaactcctcaaagaggccactgagcttgacatagttgttagacgtacagcagggctcaatgaaaaactggtgttctacaacaacaccccactaactctcctcacaccttggagaaaggtcctaacaacagggagtgtcttcaacgcaaaccaagtgtgcaatgcggttaatctgataccgctcgataccccgcagaggttccgtgttgtttatatgagcatcacccgtctttcggataacgggtattacaccgttcctagaagaatgctggaattcagatcggtcaatgcagtggccttcaacctgctggtgacccttaggattgacaaggcgataggccctgggaagatcatcgacaatacagagcaacttcctgaggcaacatttatggtccacatcgggaacttcaggagaaagaagagtgaagtctactctgccgattattgcaaaatgaaaatcgaaaagatgggcctggtttttgcacttggtgggatagggggcaccagtcttcacattagaagcacaggcaaaatgagcaagactctccatgcacaactcgggttcaagaagaccttatgttacccgctgatggatatcaatgaagaccttaatcgattactctggaggagcagatgcaagatagtaagaatccaggcagttttgcagccatcagttcctcaagaattccgcatttacgacgacgtgatcataaatgatgaccaaggactattcaaagttctgtagaccgtagtgcccagcaatgcccgaaaacgacccccctcacaatgacagccagaaggcccggacaaaaaagccccctccgaaagactccacggaccaagcgagaggccagccagcagccgacggcaagcgcgaacaccaggcggccccagcacagaacagccctgacacaaggccaccaccagccaccccaatctgcatcctcctcgtgggacccccgaggaccaacccccaaggctgcccccgatccaaaccaccaaccgcatccccaccacccccgggaaagaaacccccagcaattggaaggcccctccccctcttcctcaacacaagaactccacaaccgaaccgcacaagcgaccgaggtgacccaaccgcaggcatccgactccctagacagatcctctctccccggcaaactaaacaaaacttagggccaaggaacatacacacccaacagaacccagaccccggcccacggcgccgcgcccccaacccccgacaaccagagggagcccccaaccaatcccgccggctcccccggtgcccacaggcagggacaccaacccccgaacagacccagcacccaaccatcgacaatccaagacgggggggcccccccaaaaaaaggcccccaggggccgacagccagcaccgcgaggaagcccacccaccccacacacgaccacggcaaccaaaccagaacccagaccaccctgggccaccagctcccagactcggccatcaccccgcagaaaggaaaggccacaacccgcgcaccccagccccgatccggcggggagccacccaacccgaaccagcacccaagagcgatccccgaaggacccccgaaccgcaaaggacatcagtatcccacagcctctccaagtcccccggtctcctcctcttctcgaagggaccaaaagatcaatccaccacacccgacgacactcaactccccacccctaaaggagacaccgggaatcccagaatcaagactcatccaatgtccatcatgggtctcaaggtgaacgtctctgccatattcatggcagtactgttaactctccaaacacccaccggtcaaatccattggggcaatctctctaagataggggtggtaggaataggaagtgcaagctacaaagttatgactcgttccagccatcaatcattagtcataaaattaatgcccaatataactctcctcaataactgcacgagggtagagattgcagaatacaggagactactgagaacagttttggaaccaattagagatgcacttaatgcaatgacccagaatataagaccggttcagagtgtagcttcaagtaggagacacaagagatttgcgggagtagtcctggcaggtgcggccctaggcgttgccacagctgctcagataacagccggcattgcacttcaccagtccatgctgaactctcaagccatcgacaatctgagagcgagcctggaaactactaatcaggcaattgagacaatcagacaagcagggcaggagatgatattggctgttcagggtgtccaagactacatcaataatgagctgataccgtctatgaaccaactatcttgtgatttaatcggccagaagctcgggctcaaattgctcagatactatacagaaatcctgtcattatttggccccagtttacgggaccccatatctgcggagatatctatccaggctttgagctatgcgcttggaggagacatcaataaggtgttagaaaagctcggatacagtggaggtgatttactgggcatcttagagagcggaggaataaaggcccggataactcacgtcgacacagagtcctacttcattgtcctcagtatagcctatccgacgctgtccgagattaagggggtgattgtccaccggctagagggggtctcgtacaacataggctctcaagagtggtataccactgtgcccaagtatgttgcaacccaagggtaccttatctcgaattttgatgagtcatcgtgtactttcatgccagaggggactgtgtgcagccaaaatgccttgtacccgatgagtcctctgctccaagaatgcctccgggggtacaccaagtcctgtgctcgtacactcgtatccgggtcttttgggaaccggttcattttatcacaagggaacctaatagccaattgtgcatcaatcctttgcaagtgttacacaacaggaacgatcattaatcaagaccctgacaagatcctaacatacattgctgccgatcactgcccggtagtcgaggtgaacggcgtgaccatccaagtcgggagcaggaggtatccagacgctgtgtacttgcacagaattgacctcggtcctcccatatcattggagaggttggacgtagggacaaatctggggaatgcaattgctaagttggaggatgccaaggaattgttggagtcatcggaccagatattgaggagtatgaaaggtttatcgagcactagcatagtctacatcctgattgcagtgtgtcttggagggttgatagggatccccgctttaatatgttgctgcagggggcgttgtaacaaaaagggagaacaagttggtatgtcaagaccaggcctaaagcctgatcttacgggaacatcaaaatcctatgtaaggtcgctctgatcctctacaactcttgaaacacaaatgtcccacaagtctcctcttcgtcatcaagcaaccaccgcacccagcatcaagcccacctgaaattatctccggcttccctctggccgaacaatatcggtagttaatcaaaacttagggtgcaagatcatccacaatgtcaccacaacgagaccggataaatgccttctacaaagataacccccatcccaagggaagtaggatagtcattaacagagaacatcttatgattgatagaccttatgttttgctggctgttctgtttgtcatgtttctgagcttgatcgggttgctagccattgcaggcattagacttcatcgggcagccatctacaccgcagagatccataaaagcctcagcaccaatctagatgtaactaactcaatcgagcatcaggtcaaggacgtgctgacaccactcttcaaaatcatcggtgatgaagtgggcctgaggacacctcagagattcactgacctagtgaaattaatctctgacaagattaaattccttaatccggatagggagtacgacttcagagatctcacttggtgtatcaacccgccagagagaatcaaattggattatgatcaatactgtgcagatgtggctgctgaagagctcatgaatgcattggtgaactcaactctactggagaccagaacaaccaatcagttcctagctgtctcaaagggaaactgctcagggcccactacaatcagaggtcaattctcaaacatgtcgctgtccctgttagacttgtatttaggtcgaggttacaatgtgtcatctatagtcactatgacatcccagggaatgtatgggggaacttacctagtggaaaagcctaatctgagcagcaaaaggtcagagttgtcacaactgagcatgtaccgagtgtttgaagtaggtgttatcagaaatccgggtttgggggctccggtgttccatatgacaaactatcttgagcaaccagtcagtaatgatctcagcaactgtatggtggctttgggggagctcaaactcgcagccctttgtcacggggaagattctatcacaattccctatcagggatcagggaaaggtgtcagcttccagctcgtcaagctaggtgtctggaaatccccaaccgacatgcaatcctgggtccccttatcaacggatgatccagtgatagacaggctttacctctcatctcacagaggtgttatcgctgacaatcaagcaaaatgggctgtcccgacaacacgaacagatgacaagttgcgaatggagacatgcttccaacaggcgtgtaagggtaaaatccaagcactctgcgagaatcccgagtgggcaccattgaaggataacaggattccttcatacggggtcttgtctgttgatctgagtctgacagttgagcttaaaatcaaaattgcttcgggattcgggccattgatcacacacggttcagggatggacctatacaaatccaaccacaacaatgtgtattggctgactatcccgccaatgaagaacctagccttaggtgtaatcaacacattggagtggataccgagattcaaggttagtccctacctcttcactgtcccaattaaggaagcaggcgaagactgccatgccccaacatacctacctgcggaggtggatggtgatgtcaaactcagttccaatctggtgattctacctggtcaagatctccaatatgttttggcaacctacgatacttccagggttgaacatgctgtggtttattacgtttacagcccaagccgctcattttcttacttttatccttttaggttgcctataaagggggtccccatcgaattacaagtggaatgcttcacatgggaccaaaaactctggtgccgtcacttctgtgtgcttgcggactcagaatctggtggacatatcactcactctgggatggtgggcatgggagtcagctgcacagtcacccgggaagatggaaccaatcgcagatagggctgctagtgaaccaatcacatgatgtcacccagacatcaggcatacccactagtctaccctccatcattgttataaaaaacttaggaaccaggtccacacagccgccagcccatcaacgcgtacggccaccatgttcgtgtttctggtgctgctgccactggtgtccagtcagtgcgtgaacctgaccacacgaacacagctgccaccagcctacaccaatagcttcacccgcggagtgtactaccccgacaaggtgttccgcagcagcgtgctgcatagcacccaggatctgtttctgcccttcttcagcaacgtgacctggttccacgccatccacgtgtccggcaccaatggcaccaagcgcttcgataatcccgtgctgcccttcaacgatggcgtgtactttgccagcaccgagaagtccaatatcatccgcggctggatcttcggcaccacactggatagcaagacccagagcctgctgatcgtgaacaacgccaccaacgtggtcatcaaagtgtgcgagttccagttctgcaacgaccccttcctgggcgtctactaccacaagaacaacaagagctggatggaaagcgagttccgcgtgtacagcagcgccaacaactgcaccttcgagtacgtgtcccagccattcctgatggacctggaaggcaagcagggcaacttcaagaacctgcgcgagttcgtgttcaagaacatcgacggctacttcaaaatctacagcaagcacaccccaatcaacctcgtgcgcgatctgccacagggattcagtgctctggaacccctggtggatctgcccatcggcatcaacattacccgctttcagacactgctggccctgcaccgcagttacttgacaccaggcgatagcagcagtggatggacagctggtgccgccgcttactacgttggatatctgcagccacgcacctttctgctgaagtacaacgagaacggcaccatcaccgacgccgtggattgtgctctcgatcccctgagcgagacaaagtgcaccctgaagtccttcaccgtcgagaagggcatctaccagaccagcaatttccgcgtgcagcccaccgagagcatcgtgcgcttccccaatatcaccaatctgtgccccttcggcgaggtgttcaatgccacacgctttgcctccgtgtacgcctggaatcgcaagcgcattagcaactgcgtggccgactactccgtgctgtacaatagcgccagcttcagcaccttcaagtgctacggcgtgtcacccaccaagctgaacgacctgtgcttcaccaatgtgtacgccgacagcttcgtgatccgcggagatgaagtgcgacagattgccccaggccagaccggcaagatcgccgactacaattacaagctgcccgacgacttcaccggctgcgtgatcgcctggaacagcaacaacctggattccaaagtcggcggcaactacaactacctgtaccgcctgttccgcaagagcaatctgaagcccttcgagcgcgacatcagcaccgaaatctaccaggccggaagcaccccatgcaacggcgtggaaggcttcaactgctacttcccactgcagtcctacggatttcagcccacaaatggcgtgggctaccagccatatcgagtggtggtgctgagcttcgaactgctgcatgctccagctaccgtgtgcggccccaagaagagtaccaacctggtcaagaacaaatgcgtgaacttcaacttcaacggcctgaccggaaccggcgtgctgaccgagagtaacaagaagttcctgccattccagcagtttggccgcgacattgccgatacaaccgatgccgttcgcgatccccagaccttggagatcctggatattaccccatgctccttcggcggcgtgtccgtgattacaccaggcaccaataccagcaaccaggtggccgttctgtaccaggatgtgaattgcacagaggtgcccgtggccattcacgccgatcaattgacaccaacatggcgcgtgtactccaccggcagcaatgtgtttcaaacccgcgctggatgcctgattggagccgagcacgtgaacaatagctacgagtgcgatatccccatcggagccggaatctgcgcctcctatcagacccagaccaatagtccacgacgagcccgaagtgtggccagccagagcatcattgcctataccatgagcctgggcgccgagaatagcgtggcctactccaacaacagcattgctatccccaccaacttcaccatcagcgtgaccaccgagatcctgccagtgtccatgaccaagaccagcgtggactgcaccatgtacatctgcggagatagcaccgagtgcagcaacctgctgctgcagtacggaagtttctgcacccagctgaatcgcgccctgacaggcattgccgtggaacaggataagaacacccaagaggtgttcgcccaagtgaagcaaatctacaagaccccaccaatcaaggatttcggcggcttcaatttcagccagattctgcccgatccaagcaagcccagcaagcgcagcttcatcgaggacctgctgttcaacaaagtgacactggccgacgccggattcatcaagcagtatggcgattgcctgggcgatattgccgcacgcgatctgatttgcgcccagaagtttaacggactgaccgtcctgccaccactgctgacagatgagatgatcgcccagtacacaagtgccctgctggccggaaccattaccagcggatggacatttggagccggtgccgctctgcagattcccttcgctatgcagatggcctaccgcttcaatggcattggcgtgacccagaatgtgctgtacgagaaccagaagctgatcgccaaccagttcaacagcgccatcggcaagattcaggacagcctgagtagtaccgccagcgctctgggaaagctgcaggatgtggtcaaccagaacgctcaggccctgaacaccctggttaagcagctgagcagcaacttcggcgccatcagtagcgtgctgaacgatatcctgagccgcctggataaggtggaagccgaggtgcagatcgatcgcctgattaccggacgcctgcagtccctgcagacctatgtgacacagcagctgatccgagccgccgagattcgagctagtgctaatctggccgccaccaagatgagcgaatgtgtgctgggacagagcaagcgcgtggacttttgcggcaagggataccacctgatgagcttcccacagagtgctccacacggcgtggtgtttctgcatgtgacctacgtgcccgctcaagagaagaatttcaccaccgctccagccatctgccacgacggaaaggcccattttccacgcgagggcgtgttcgttagcaacggcactcattggttcgtcacccagcgcaacttctacgagccccagatcatcaccaccgacaacaccttcgtcagcggcaactgcgacgtcgtgatcggcattgtgaacaacaccgtgtacgatccactgcagcccgagctggacagcttcaaagaggaactggacaagtactttaagaaccacacaagccccgacgtggacctgggagacattagcggaatcaacgccagcgtggtcaacatccagaaagagattgaccgcctgaacgaggtggccaagaatctgaacgagagcctgatcgacctgcaagaactgggcaaatacgagcagtacattaagtggccctggtacatctggctgggcttcattgccggactgattgccatcgtgatggtcaccattatgctgtgctgcatgaccagttgctgcagctgcctgaagggatgctgcagttgcggaagctgctgcaagttcgacgaggatgatagcgagccagtgctgaagggcgtcaagctgcactacacctgataacgagcgcgcagcgcttagacgtctcgcgatcgatgctagtgtgaaatagacatcagaattaagaaaaacgtagggtccaagtggttccccgttatggactcgctatctgtcaaccagatcttataccctgaagttcacctagatagcccgatagttaccaataagatagtagccatcctggagtatgctcgagtccctcacgcttacagcctggaggaccctacactgtgtcagaacatcaagcaccgcctaaaaaacggattttccaaccaaatgattataaacaatgtggaagttgggaatgtcatcaagtccaagcttaggagttatccggcccactctcatattccatatccaaattgtaatcaggatttatttaacatagaagacaaagagtcaacgaggaagatccgtgaactcctcaaaaaggggaattcgctgtactccaaagtcagtgataaggttttccaatgcttaagggacactaactcacggcttggcctaggctccgaattgagggaggacatcaaggagaaagttattaacttgggagtttacatgcacagctcccagtggtttgagccctttctgttttggtttacagtcaagactgagatgaggtcagtgattaaatcacaaacccatacttgccataggaggagacacacacctgtattcttcactggtagttcagttgagttgctaatctctcgtgaccttgttgctataatcagtaaagagtctcaacatgtatattacctgacatttgaactggttttgatgtattgtgatgtcatagaggggaggttaatgacagagaccgctatgactattgatgctaggtatacagagcttctaggaagagtcagatacatgtggaaactgatagatggtttcttccctgcactcgggaatccaacttatcaaattgtagccatgctggagcctctttcacttgcttacctgcagctgagggatataacagtagaactcagaggtgctttccttaaccactgctttactgaaatacatgatgttcttgaccaaaacgggttttctgatgaaggtacttatcatgagttaactgaagctctagattacattttcataactgatgacatacatctgacaggggagattttctcatttttcagaagtttcggccaccccagacttgaagcagtaacggctgctgaaaatgttaggaaatacatgaatcagcctaaagtcattgtgtatgagactctgatgaaaggtcatgccatattttgtggaatcataatcaacggctatcgtgacaggcacggaggcagttggccaccgctgaccctccccctgcatgctgcagacacaatccggaatgctcaagcttcaggtgaagggttaacacatgagcagtgcgttgataactggaaatcttttgctggagtgaaatttggctgctttatgcctcttagcctggatagtgatctgacaatgtacctaaaggacaaggcacttgctgctctccaaagggaatgggattcagtttacccgaaagagttcctgcgttacgaccctcccaagggaaccgggtcacggaggcttgtagatgttttccttaatgattcgagctttgacccatatgatgtgataatgtatgttgtaagtggagcttacctccatgaccctgagttcaacctgtcttacagcctgaaagaaaaggagatcaaggaaacaggtagactttttgctaaaatgacttacaaaatgagggcatgccaagtgattgctgaaaatctaatctcaaacgggattggcaaatattttaaggacaatgggatggccaaggatgagcacgatttgactaaggcactccacactctagctgtctcaggagtccccaaagatctcaaagaaagtcacaggggggggccagtcttaaaaacctactcccgaagcccagtccacacaagtaccaggaacgtgagagcagcaaaagggtttatagggttccctcaagtaattcggcaggaccaagacactgatcatccggagaatatggaagcttacgagacagtcagtgcatttatcacgactgatctcaagaagtactgccttaattggagatatgagaccatcagcttgtttgcacagaggctaaatgagatttacggattgccctcatttttccagtggctgcataagaggcttgagacctctgtcctgtatgtaagtgaccctcattgcccccccgaccttgacgcccatatcccgttatataaagtccccaatgatcaaatcttcattaagtaccctatgggaggtatagaagggtattgtcagaagctgtggaccatcagcaccattccctatctatacctggctgcttatgagagcggagtaaggattgcttcgttagtgcaaggggacaatcagaccatagccgtaacaaaaagggtacccagcacatggccctacaaccttaagaaacgggaagctgctagagtaactagagattactttgtaattcttaggcaaaggctacatgatattggccatcacctcaaggcaaatgagacaattgtttcatcacatttttttgtctattcaaaaggaatatattatgatgggctacttgtgtcccaatcactcaagagcatcgcaagatgtgtattctggtcagagactatagttgatgaaacaagggcagcatgcagtaatattgctacaacaatggctaaaagcatcgagagaggttatgaccgttaccttgcatattccctgaacgtcctaaaagtgatacagcaaattctgatctctcttggcttcacaatcaattcaaccatgacccgggatgtagtcatacccctcctcacaaacaacgacctcttaataaggatggcactgttgcccgctcctattggggggatgaattatctgaatatgagcaggctgtttgtcagaaacatcggtgatccagtaacatcatcaattgctgatctcaagagaatgattctcgcctcactaatgcctgaagagaccctccatcaagtaatgacacaacaaccgggggactcttcattcctagactgggctagcgacccttactcagcaaatcttgtatgtgtccagagcatcactagactcctcaagaacataactgcaaggtttgtcctgatccatagtccaaacccaatgttaaaaggattattccatgatgacagtaaagaagaggacgagggactggcggcattcctcatggacaggcatattatagtacctagggcagctcatgaaatcctggatcatagtgtcacaggggcaagagagtctattgcaggcatgctggataccacaaaaggcttgattcgagccagcatgaggaagggggggttaacctctcgagtgataaccagattgtccaattatgactatgaacaattcagagcagggatggtgctattgacaggaagaaagagaaatgtcctcattgacaaagagtcatgttcagtgcagctggcgagagctctaagaagccatatgtgggcgaggctagctcgaggacggcctatttacggccttgaggtccctgatgtactagaatctatgcgaggccaccttattcggcgtcatgagacatgtgtcatctgcgagtgtggatcagtcaactacggatggttttttgtcccctcgggttgccaactggatgatattgacaaggaaacatcatccttgagagtcccatatattggttctaccactgatgagagaacagacatgaagcttgccttcgtaagagccccaagtcgatccttgcgatctgctgttagaatagcaacagtgtactcatgggcttacggtgatgatgatagctcttggaacgaagcctggttgttggctaggcaaagggccaatgtgagcctggaggagctaagggtgatcactcccatctcaacttcgactaatttagcgcataggttgagggatcgtagcactcaagtgaaatactcaggtacatcccttgtccgagtggcgaggtataccacaatctccaacgacaatctctcatttgtcatatcagataagaaggttgatactaactttatataccaacaaggaatgcttctagggttgggtgttttagaaacattgtttcgactcgagaaagataccggatcatctaacacggtattacatcttcacgtcgaaacagattgttgcgtgatcccgatgatagatcatcccaggatacccagctcccgcaagctagagctgagggcagagctatgtaccaacccattgatatatgataatgcacctttaattgacagagatgcaacaaggctatacacccagagccataggaggcaccttgtggaatttgttacatggtccacaccccaactatatcacattttagctaagtccacagcactatctatgattgacctggtaacaaaatttgagaaggaccatatgaatgaaatttcagctctcataggggatgacgatatcaatagtttcataactgagtttctgctcatagagccaagattattcactatctacttgggccagtgtgcggccatcaattgggcatttgatgtacattatcatagaccatcagggaaatatcagatgggtgagctgttgtcatcgttcctttctagaatgagcaaaggagtgtttaaggtgcttgtcaatgctctaagccacccaaagatctacaagaaattctggcattgtggtattatagagcctatccatggtccttcacttgatgctcaaaacttgcacacaactgtgtgcaacatggtttacacatgctatatgacctacctcgacctgttgttgaatgaagagttagaagagttcacatttctcttgtgtgaaagcgacgaggatgtagtaccggacagattcgacaacatccaggcaaaacacttatgtgttctggcagatttgtactgtcaaccagggacctgcccaccaattcgaggtctaagaccggtagagaaatgtgcagttctaaccgaccatatcaaggcagaggctatgttatctccagcaggatcttcgtggaacataaatccaattattgtagaccattactcatgctctctgacttatctccggcgaggatcgatcaaacagataagattgagagttgatccaggattcattttcgacgccctcgctgaggtaaatgtcagtcagccaaagatcggcagcaacaacatctcaaatatgagcatcaaggctttcagacccccacacgatgatgttgcaaaattgctcaaagatatcaacacaagcaagcacaatcttcccatttcagggggcaatctcgccaattatgaaatccatgctttccgcagaatcgggttgaactcatctgcttgctacaaagctgttgagatatcaacattaattaggagatgccttgagccaggggaggacggcttgttcttgggtgagggatcgggttctatgttgatcacttataaagagatacttaaactaaacaagtgcttctataatagtggggtttccgccaattctagatctggtcaaagggaattagcaccctatccctccgaagttggccttgtcgaacacagaatgggagtaggtaatattgtcaaagtgctctttaacgggaggcccgaagtcacgtgggtaggcagtgtagattgcttcaatttcatagttagtaatatccctacctctagtgtggggtttatccattcagatatagagaccttgcctgacaaagatactatagagaagctagaggaattggcagccatcttatcgatggctctgctcctgggcaaaataggatcaatactggtgattaagcttatgcctttcagcggggattttgttcagggatttataagttatgtagggtctcattatagagaagtgaaccttgtataccctagatacagcaacttcatctctactgaatcttatttggttatgacagatctcaaggctaaccggctaatgaatcctgaaaagattaagcagcagataattgaatcatctgtgaggacttcacctggacttataggtcacatcctatccattaagcaactaagctgcatacaagcaattgtgggagacgcagttagtagaggtgatatcaatcctactctgaaaaaacttacacctatagagcaggtgctgatcaattgcgggttggcaattaacggacctaagctgtgcaaagaattgatccaccatgatgttgcctcagggcaagatggattgcttaattctatactcatcctctacagggagttggcaagattcaaagacaaccaaagaagtcaacaagggatgttccacgcttaccccgtattggtaagtagcaggcaacgagaacttatatctaggatcacccgcaaattctgggggcacattcttctttactccgggaacaaaaagttgataaataagtttatccagaatctcaagtccggctatctgatactagacttacaccagaatatcttcgttaagaatctatccaagtcagagaaacagattattatgacggggggtttgaaacgtgagtgggtttttaaggtaacagtcaaggagaccaaagaatggtataagttagtcggatacagtgccctgattaaggactaattggttgaactccggaaccctaatcctgccctaggtggttaggcattatttgcaatatattaaagaaaactttgaaaatacgaagtttctattcccagctttgtctggtggccggcatggtcccagcctcctcgctggcgccggctgggcaacattccgaggggaccgtcccctcggtaatggcgaatgggacgcggccgatccggctgctaacaaagcccgaaaggaagctgagttggctgctgccaccgctgagcaataactagcataaccccttggggcctctaaacgggtcttgaggggttttttgctgaaaggaggaactatatccggatgcggccgccatgaacaataaaactgtctgcttacataaacagtaatacaaggggtgttatgagccatattcaacgggaaacgtcgaggccgcgattaaattccaacatggatgctgatttatatgggtataaatgggctcgcgataatgtcgggcaatcaggtgcgacaatctatcgcttgtatgggaagcccgatgcgccagagttgtttctgaaacatggcaaaggtagcgttgccaatgatgttacagatgagatggtcagactaaactggctgacggaatttatgcctcttccgaccatcaagcattttatccgtactcctgatgatgcatggttactcaccactgcgatccccggaaaaacagcattccaggtattagaagaatatcctgattcaggtgaaaatattgttgatgcgctggcagtgttcctgcgccggttgcattcgattcctgtttgtaattgtccttttaacagcgatcgtgtatttcgtctcgctcaggcgcaatcacgaatgaataacggtttggttgatgcgagtgattttgatgacgagcgtaatggctggcctgttgaacaagtctggaaagaaatgcataaacttttgccattctcaccggattcagtcgtcactcatggtgatttctcacttgataaccttatttttgacgaggggaaattaataggttgtattgatgttggacgagtcggaatcgcagaccgataccaggatcttgccatcctatggaactgcctcggtgagttttctccttcattacagaaacggctttttcaaaaatatggtattgataatcctgatatgaataaattgcagtttcatttgatgctcgatgagtttttctaatcagaattggttaattggttgtaacattattcagattgggccccgttccactgagcgtcagaccccgtagaaaagatcaaaggatcttcttgagatcctttttttctgcgcgtaatctgctgcttgcaaacaaaaaaaccaccgctaccagcggtggtttgtttgccggatcaagagctaccaactctttttccgaaggtaactggcttcagcagagcgcagataccaaatactgttcttctagtgtagccgtagttaggccaccacttcaagaactctgtagcaccgcctacatacctcgctctgctaatcctgttaccagtggctgctgccagtggcgataagtcgtgtcttaccgggttggactcaagacgatagttaccggataaggcgcagcggtcgggctgaacggggggttcgtgcacacagcccagcttggagcgaacgacctacaccgaactgagatacctacagcgtgagctatgagaaagcgccacgcttcccgaagggagaaaggcggacaggtatccggtaagcggcagggtcggaacaggagagcgcacgagggagcttccagggggaaacgcctggtatctttatagtcctgtcgggtttcgccacctctgacttgagcgtcgatttttgtgatgctcgtcaggggggcggagcctatggaaaaacgccagcaacgcggcctttttacggttcctggccttttgctggccttttgctcacatgttctttcctgcgttatcccctgattctgtggataaccgtattaccgctag

SEQ ID NO: 36 - DNA, 3870 bp, Artificial sequence
  MV-optimized nucleotide sequence of the spike (S) polypeptide of nCoV
gctagcggatcccgtacggccaccatgtttgtgtttttggttttgttgccactggtgtccagtcagtgtgttaatttgacaacaagaacacagctgccaccagcctacacaaatagttttacaaggggagtgtactacccagataaggtgttcagaagtagtgttctgcatagcacacaggatctgtttctgccattctttagcaatgtgacctggttccatgctattcatgtttccggtacaaatggcaccaagcgctttgataatccagtgttgccattcaatgatggcgtgtactttgccagtaccgagaagagtaatatcattcgcggatggattttcggaaccacactggatagtaaaacccagagtctgctgattgtgaacaatgccaccaatgtggttatcaaagtgtgcgagtttcagttctgcaatgatccatttctgggcgtctactaccataagaacaacaagagttggatggaaagcgagtttagagtgtacagtagtgccaacaattgcacctttgaatacgttagccagccattcttgatggatttggagggaaagcagggcaatttcaagaatctgcgcgagttcgtgttcaagaatatcgacggatacttcaaaatctacagcaagcacacaccaatcaatcttgttagagatttgccacagggattcagtgctttggaaccattggttgatctgccaatcggaatcaatattaccagatttcaaacactgctggccctgcatagaagttatttgacaccaggcgattcaagtagtggatggacagctggtgctgctgcttattatgttggatatctgcaaccacgaacctttctgctgaagtacaatgagaatggaacaatcacagatgctgtggattgtgctcttgatccactgagtgaaacaaagtgcaccctgaagagttttaccgttgagaagggaatctaccagaccagtaattttcgagtgcagccaacagaaagtatcgtgcgcttcccaaatattacaaatctgtgcccattcggcgaagtgtttaatgctacaagatttgctagtgtgtacgcctggaatcgcaagagaattagtaattgcgtggccgattacagcgtgctgtataatagtgccagctttagcacctttaagtgctatggtgttagtcccacaaagctgaatgatctgtgctttaccaatgtgtatgccgatagttttgtgatcaggggagatgaagttcgacaaattgctccaggacagactggaaagattgccgattataactacaagctgccagatgatttcaccggatgtgtgattgcctggaacagtaacaatctggatagcaaagttggcggcaactacaattatctgtatcgcctgtttcgcaagagcaatctgaaaccatttgagcgcgatatcagcaccgaaatctatcaagctggaagtactccatgcaatggcgtggaaggttttaattgctactttccactgcagtcctacggatttcaacctactaatggtgttggataccagccatatagagtggtggttctgagttttgaattgctgcatgctccagctacagtgtgtggaccaaagaaaagtaccaacctggttaagaacaaatgcgtgaacttcaacttcaatggactgactggtacaggcgttctgactgagagtaacaagaaattcctgccatttcagcagtttggacgagatattgctgatacaacagatgcagttagagatccccaaacactggaaattctggatattaccccatgcagttttggcggagttagtgttattacacccggcacaaataccagtaatcaagttgctgtgctgtaccaggatgtgaattgcacagaagttccagttgcaattcatgcagatcagttgacaccaacatggcgagtgtatagtaccggaagtaatgtttttcagacacgagctggatgtctgattggagccgaacatgttaacaatagctacgagtgcgatattccaattggtgctggaatttgcgctagttatcagacccaaacaaatagtccaagacgagcaagaagtgtggccagtcagagtattattgcctatacaatgagtctgggagccgagaatagtgtggcctatagtaacaattccattgctatccccaccaactttaccattagtgtgacaacagagattctgccagtgtccatgacaaagacaagtgtggattgcaccatgtacatttgcggagatagtacagaatgcagtaatctgctgctgcagtatggaagtttctgtacacaactgaatagagccctgactggaattgctgtggaacaggataagaatactcaagaggtgttcgcccaagtgaagcaaatctataagaccccacctattaaggatttcggcggattcaatttcagtcagattttgccagatccaagcaagccatccaaacgcagttttattgaggacctgctgttcaacaaagtgacattggctgatgctggctttattaagcaatatggcgattgtctgggagatatagctgccagagatttgatttgcgcccaaaagtttaatggattgacagttttgccaccactgctgacagatgagatgattgctcagtatacaagtgctctgctggccggaacaattacatcaggatggacatttggagctggtgcagcattgcaaataccatttgctatgcagatggcctaccgctttaatggtattggagttacccagaacgtgctgtacgaaaatcagaagctgatcgccaatcagttcaatagcgccattggaaaaattcaggatagcctgagtagtactgctagtgctcttggaaaactgcaggatgtggttaatcagaatgctcaggctctgaatactctggttaagcagttgagttccaatttcggagctattagcagtgtgctgaacgatattctgagtcgtttggataaggttgaggccgaagttcagattgatagactgattacaggacgactgcagagcttgcagacatatgttacacaacaactgattcgagccgctgaaattagagctagtgctaatttggctgccacaaagatgagtgaatgtgtgcttggacagagcaaaagagtggatttttgcggcaaaggataccatctgatgagctttccacaaagtgctccacatggtgttgtgtttctgcatgttacttatgtgcccgctcaagagaagaatttcacaacagctccagccatttgccatgatggaaaagctcattttccacgagaaggcgtgttcgttagtaatggtactcattggttcgtgacccagcgcaatttttacgagccacagattattaccaccgacaatactttcgtgtccggcaattgtgatgttgtgattggaatcgtgaacaacacagtgtacgatccattgcagccagagctggatagttttaaagaggaactggacaagtacttcaagaaccatacaagtccagatgtggatctgggcgatattagtggaatcaatgcctccgtggtcaacatccagaaagaaattgatcgactgaacgaagtggccaagaatttgaatgagagcctgattgatctgcaagagctgggcaaatacgagcagtatattaagtggccttggtacatttggctgggattcattgctggactgattgccattgtgatggttaccattatgctgtgttgcatgacaagttgttgcagttgcctgaaaggatgctgtagttgcggtagttgctgcaagtttgatgaggatgatagtgaaccagtgctgaaaggcgtgaagctgcattatacttgataacgagcgcgcctcgaggaattc

SEQ ID NO: 37 - DNA, 1308 bp, Artificial sequence
  MV-optimized nucleotide sequence of the N polypeptide of CoV
gctagcggatcccgtacggccaccatgagtgataatggaccacaaaatcaacgcaatgccccaagaattacatttggaggaccaagtgatagcaccggaagtaatcaaaatggcgaaagaagtggtgctagaagtaaacaaagacgaccacaaggactgccaaacaatactgctagttggtttacagctctgacccagcatggaaaagaggatttgaaatttccaagaggacagggcgtgccaatcaataccaatagtagtccagatgatcagattggctattatagacgagctacaagaagaatacgaggcggagatggaaaaatgaaggatttgagtccacgctggtacttctattatcttggaacaggaccagaggctggattgccatatggtgctaacaaagatggaattatttgggttgcaacagaaggtgccctgaataccccaaaagatcatattggaacacgcaatcctgccaacaatgctgcaattgtgttgcaattgccacagggaacaacactgcctaaaggattctatgctgagggaagtagaggtggaagtcaagctagttcaagaagtagtagtcgcagtagaaatagcagtcgaaatagtacacctggaagtagtagaggaacaagtccagctagaatggctggaaatggtggtgatgctgctttggctttgttgctgttggatagactgaatcagctggaaagcaaaatgagtggcaaaggacaacaacagcagggacagacagttacaaagaaaagtgctgctgaagcaagcaagaaaccacgtcaaaaacgaacagccacaaaggcctataatgtgacacaagcttttggacgaagaggaccagaacagacacagggaaattttggagatcaagaactgattcgccagggaacagattacaaacattggccacaaattgcccagtttgctccaagtgctagtgctttctttggaatgagtcgaattggaatggaagtgacaccaagtggaacatggttgacatatacaggtgccatcaagctggatgataaggacccaaatttcaaggatcaagtgatcctgctgaacaaacacatcgacgcctataagacatttccaccaacagaacccaagaaggataagaagaagaaagctgacgaaacacaagctctgccacagagacaaaagaaacagcaaacagttactctgctgccagctgctgatctggatgatttcagtaaacaactgcagcagagcatgagtagtgctgatagtacacaagcctgataacgagcgcgcctcgaggaattc

SEQ ID NO: 38 - DNA, 19795 bp, Artificial sequence
  pTM3-MVSchw-gfp
accaaacaaagttgggtaaggatagttcaatcaatgatcatcttctagtgcacttaggattcaagatcctattatcagggacaagagcaggattagggatatccgagatggccacacttttaaggagcttagcattgttcaaaagaaacaaggacaaaccacccattacatcaggatccggtggagccatcagaggaatcaaacacattattatagtaccaatccctggagattcctcaattaccactcgatccagacttctggaccggttggtgaggttaattggaaacccggatgtgagcgggcccaaactaacaggggcactaataggtatattatccttatttgtggagtctccaggtcaattgattcagaggatcaccgatgaccctgacgttagcataaggctgttagaggttgtccagagtgaccagtcacaatctggccttaccttcgcatcaagaggtaccaacatggaggatgaggcggaccaatacttttcacatgatgatccaattagtagtgatcaatccaggttcggatggttcgggaacaaggaaatctcagatattgaagtgcaagaccctgagggattcaacatgattctgggtaccatcctagcccaaatttgggtcttgctcgcaaaggcggttacggccccagacacggcagctgattcggagctaagaaggtggataaagtacacccaacaaagaagggtagttggtgaatttagattggagagaaaatggttggatgtggtgaggaacaggattgccgaggacctctccttacgccgattcatggtcgctctaatcctggatatcaagagaacacccggaaacaaacccaggattgctgaaatgatatgtgacattgatacatatatcgtagaggcaggattagccagttttatcctgactattaagtttgggatagaaactatgtatcctgctcttggactgcatgaatttgctggtgagttatccacacttgagtccttgatgaacctttaccagcaaatgggggaaactgcaccctacatggtaatcctggagaactcaattcagaacaagttcagtgcaggatcataccctctgctctggagctatgccatgggagtaggagtggaacttgaaaactccatgggaggtttgaactttggccgatcttactttgatccagcatattttagattagggcaagagatggtaaggaggtcagctggaaaggtcagttccacattggcatctgaactcggtatcactgccgaggatgcaaggcttgtttcagagattgcaatgcatactactgaggacaagatcagtagagcggttggacccagacaagcccaagtatcatttctacacggtgatcaaagtgagaatgagctaccgagattggggggcaaggaagataggagggtcaaacagagtcgaggagaagccagggagagctacagagaaaccgggcccagcagagcaagtgatgcgagagctgcccatcttccaaccggcacacccctagacattgacactgcaacggagtccagccaagatccgcaggacagtcgaaggtcagctgacgccctgcttaggctgcaagccatggcaggaatctcggaagaacaaggctcagacacggacacccctatagtgtacaatgacagaaatcttctagactaggtgcgagaggccgagggccagaacaacatccgcctaccatccatcattgttataaaaaacttaggaaccaggtccacacagccgccagcccatcaaccatccactcccacgattggagccaatggcagaagagcaggcacgccatgtcaaaaacggactggaatgcatccgggctctcaaggccgagcccatcggctcactggccatcgaggaagctatggcagcatggtcagaaatatcagacaacccaggacaggagcgagccacctgcagggaagagaaggcaggcagttcgggtctcagcaaaccatgcctctcagcaattggatcaactgaaggcggtgcacctcgcatccgcggtcagggacctggagagagcgatgacgacgctgaaactttgggaatccccccaagaaatctccaggcatcaagcactgggttacagtgttattacgtttatgatcacagcggtgaagcggttaagggaatccaagatgctgactctatcatggttcaatcaggccttgatggtgatagcaccctctcaggaggagacaatgaatctgaaaacagcgatgtggatattggcgaacctgataccgagggatatgctatcactgaccggggatctgctcccatctctatggggttcagggcttctgatgttgaaactgcagaaggaggggagatccacgagctcctgagactccaatccagaggcaacaactttccgaagcttgggaaaactctcaatgttcctccgcccccggaccccggtagggccagcacttccgggacacccattaaaaagggcacagacgcgagattagcctcatttggaacggagatcgcgtctttattgacaggtggtgcaacccaatgtgctcgaaagtcaccctcggaaccatcagggccaggtgcacctgcggggaatgtccccgagtgtgtgagcaatgccgcactgatacaggagtggacacccgaatctggtaccacaatctccccgagatcccagaataatgaagaagggggagactattatgatgatgagctgttctctgatgtccaagatattaaaacagccttggccaaaatacacgaggataatcagaagataatctccaagctagaatcactgctgttattgaagggagaagttgagtcaattaagaagcagatcaacaggcaaaatatcagcatatccaccctggaaggacacctctcaagcatcatgatcgccattcctggacttgggaaggatcccaacgaccccactgcagatgtcgaaatcaatcccgacttgaaacccatcataggcagagattcaggccgagcactggccgaagttctcaagaaacccgttgccagccgacaactccaaggaatgacaaatggacggaccagttccagaggacagctgctgaaggaatttcagctaaagccgatcgggaaaaagatgagctcagccgtcgggtttgttcctgacaccggccctgcatcacgcagtgtaatccgctccattataaaatccagccggctagaggaggatcggaagcgttacctgatgactctccttgatgatatcaaaggagccaatgatcttgccaagttccaccagatgctgatgaagataataatgaagtagctacagctcaacttacctgccaaccccatgccagtcgacccaactagtacaacctaaatccattataaaaaacttaggagcaaagtgattgcctcccaaggtccacaatgacagagacctacgacttcgacaagtcggcatgggacatcaaagggtcgatcgctccgatacaacccaccacctacagtgatggcaggctggtgccccaggtcagagtcatagatcctggtctaggcgacaggaaggatgaatgctttatgtacatgtttctgctgggggttgttgaggacagcgattccctagggcctccaatcgggcgagcatttgggttcctgcccttaggtgttggcagatccacagcaaagcccgaaaaactcctcaaagaggccactgagcttgacatagttgttagacgtacagcagggctcaatgaaaaactggtgttctacaacaacaccccactaactctcctcacaccttggagaaaggtcctaacaacagggagtgtcttcaacgcaaaccaagtgtgcaatgcggttaatctgataccgctcgataccccgcagaggttccgtgttgtttatatgagcatcacccgtctttcggataacgggtattacaccgttcctagaagaatgctggaattcagatcggtcaatgcagtggccttcaacctgctggtgacccttaggattgacaaggcgataggccctgggaagatcatcgacaatacagagcaacttcctgaggcaacatttatggtccacatcgggaacttcaggagaaagaagagtgaagtctactctgccgattattgcaaaatgaaaatcgaaaagatgggcctggtttttgcacttggtgggatagggggcaccagtcttcacattagaagcacaggcaaaatgagcaagactctccatgcacaactcgggttcaagaagaccttatgttacccgctgatggatatcaatgaagaccttaatcgattactctggaggagcagatgcaagatagtaagaatccaggcagttttgcagccatcagttcctcaagaattccgcatttacgacgacgtgatcataaatgatgaccaaggactattcaaagttctgtagaccgtagtgcccagcaatgcccgaaaacgacccccctcacaatgacagccagaaggcccggacaaaaaagccccctccgaaagactccacggaccaagcgagaggccagccagcagccgacggcaagcgcgaacaccaggcggccccagcacagaacagccctgacacaaggccaccaccagccaccccaatctgcatcctcctcgtgggacccccgaggaccaacccccaaggctgcccccgatccaaaccaccaaccgcatccccaccacccccgggaaagaaacccccagcaattggaaggcccctccccctcttcctcaacacaagaactccacaaccgaaccgcacaagcgaccgaggtgacccaaccgcaggcatccgactccctagacagatcctctctccccggcaaactaaacaaaacttagggccaaggaacatacacacccaacagaacccagaccccggcccacggcgccgcgcccccaacccccgacaaccagagggagcccccaaccaatcccgccggctcccccggtgcccacaggcagggacaccaacccccgaacagacccagcacccaaccatcgacaatccaagacgggggggcccccccaaaaaaaggcccccaggggccgacagccagcaccgcgaggaagcccacccaccccacacacgaccacggcaaccaaaccagaacccagaccaccctgggccaccagctcccagactcggccatcaccccgcagaaaggaaaggccacaacccgcgcaccccagccccgatccggcggggagccacccaacccgaaccagcacccaagagcgatccccgaaggacccccgaaccgcaaaggacatcagtatcccacagcctctccaagtcccccggtctcctcctcttctcgaagggaccaaaagatcaatccaccacacccgacgacactcaactccccacccctaaaggagacaccgggaatcccagaatcaagactcatccaatgtccatcatgggtctcaaggtgaacgtctctgccatattcatggcagtactgttaactctccaaacacccaccggtcaaatccattggggcaatctctctaagataggggtggtaggaataggaagtgcaagctacaaagttatgactcgttccagccatcaatcattagtcataaaattaatgcccaatataactctcctcaataactgcacgagggtagagattgcagaatacaggagactactgagaacagttttggaaccaattagagatgcacttaatgcaatgacccagaatataagaccggttcagagtgtagcttcaagtaggagacacaagagatttgcgggagtagtcctggcaggtgcggccctaggcgttgccacagctgctcagataacagccggcattgcacttcaccagtccatgctgaactctcaagccatcgacaatctgagagcgagcctggaaactactaatcaggcaattgagacaatcagacaagcagggcaggagatgatattggctgttcagggtgtccaagactacatcaataatgagctgataccgtctatgaaccaactatcttgtgatttaatcggccagaagctcgggctcaaattgctcagatactatacagaaatcctgtcattatttggccccagtttacgggaccccatatctgcggagatatctatccaggctttgagctatgcgcttggaggagacatcaataaggtgttagaaaagctcggatacagtggaggtgatttactgggcatcttagagagcggaggaataaaggcccggataactcacgtcgacacagagtcctacttcattgtcctcagtatagcctatccgacgctgtccgagattaagggggtgattgtccaccggctagagggggtctcgtacaacataggctctcaagagtggtataccactgtgcccaagtatgttgcaacccaagggtaccttatctcgaattttgatgagtcatcgtgtactttcatgccagaggggactgtgtgcagccaaaatgccttgtacccgatgagtcctctgctccaagaatgcctccgggggtacaccaagtcctgtgctcgtacactcgtatccgggtcttttgggaaccggttcattttatcacaagggaacctaatagccaattgtgcatcaatcctttgcaagtgttacacaacaggaacgatcattaatcaagaccctgacaagatcctaacatacattgctgccgatcactgcccggtagtcgaggtgaacggcgtgaccatccaagtcgggagcaggaggtatccagacgctgtgtacttgcacagaattgacctcggtcctcccatatcattggagaggttggacgtagggacaaatctggggaatgcaattgctaagttggaggatgccaaggaattgttggagtcatcggaccagatattgaggagtatgaaaggtttatcgagcactagcatagtctacatcctgattgcagtgtgtcttggagggttgatagggatccccgctttaatatgttgctgcagggggcgttgtaacaaaaagggagaacaagttggtatgtcaagaccaggcctaaagcctgatcttacgggaacatcaaaatcctatgtaaggtcgctctgatcctctacaactcttgaaacacaaatgtcccacaagtctcctcttcgtcatcaagcaaccaccgcacccagcatcaagcccacctgaaattatctccggcttccctctggccgaacaatatcggtagttaatcaaaacttagggtgcaagatcatccacaatgtcaccacaacgagaccggataaatgccttctacaaagataacccccatcccaagggaagtaggatagtcattaacagagaacatcttatgattgatagaccttatgttttgctggctgttctgtttgtcatgtttctgagcttgatcgggttgctagccattgcaggcattagacttcatcgggcagccatctacaccgcagagatccataaaagcctcagcaccaatctagatgtaactaactcaatcgagcatcaggtcaaggacgtgctgacaccactcttcaaaatcatcggtgatgaagtgggcctgaggacacctcagagattcactgacctagtgaaattaatctctgacaagattaaattccttaatccggatagggagtacgacttcagagatctcacttggtgtatcaacccgccagagagaatcaaattggattatgatcaatactgtgcagatgtggctgctgaagagctcatgaatgcattggtgaactcaactctactggagaccagaacaaccaatcagttcctagctgtctcaaagggaaactgctcagggcccactacaatcagaggtcaattctcaaacatgtcgctgtccctgttagacttgtatttaggtcgaggttacaatgtgtcatctatagtcactatgacatcccagggaatgtatgggggaacttacctagtggaaaagcctaatctgagcagcaaaaggtcagagttgtcacaactgagcatgtaccgagtgtttgaagtaggtgttatcagaaatccgggtttgggggctccggtgttccatatgacaaactatcttgagcaaccagtcagtaatgatctcagcaactgtatggtggctttgggggagctcaaactcgcagccctttgtcacggggaagattctatcacaattccctatcagggatcagggaaaggtgtcagcttccagctcgtcaagctaggtgtctggaaatccccaaccgacatgcaatcctgggtccccttatcaacggatgatccagtgatagacaggctttacctctcatctcacagaggtgttatcgctgacaatcaagcaaaatgggctgtcccgacaacacgaacagatgacaagttgcgaatggagacatgcttccaacaggcgtgtaagggtaaaatccaagcactctgcgagaatcccgagtgggcaccattgaaggataacaggattccttcatacggggtcttgtctgttgatctgagtctgacagttgagcttaaaatcaaaattgcttcgggattcgggccattgatcacacacggttcagggatggacctatacaaatccaaccacaacaatgtgtattggctgactatcccgccaatgaagaacctagccttaggtgtaatcaacacattggagtggataccgagattcaaggttagtccctacctcttcactgtcccaattaaggaagcaggcgaagactgccatgccccaacatacctacctgcggaggtggatggtgatgtcaaactcagttccaatctggtgattctacctggtcaagatctccaatatgttttggcaacctacgatacttccagggttgaacatgctgtggtttattacgtttacagcccaagccgctcattttcttacttttatccttttaggttgcctataaagggggtccccatcgaattacaagtggaatgcttcacatgggaccaaaaactctggtgccgtcacttctgtgtgcttgcggactcagaatctggtggacatatcactcactctgggatggtgggcatgggagtcagctgcacagtcacccgggaagatggaaccaatcgcagatagggctgctagtgaaccaatcacatgatgtcacccagacatcaggcatacccactagtctaccctccatcattgttataaaaaacttaggaaccaggtccacacagccgccagcccatcaacgcgtacgatggtgagcaagggcgaggagctgttcaccggggtggtgcccatcctggtcgagctggacggcgacgtaaacggccacaagttcagcgtgtccggcgagggcgagggcgatgccacctacggcaagctgaccctgaagttcatctgcaccaccggcaagctgcccgtgccctggcccaccctcgtgaccaccctgacctacggcgtgcagtgcttcagccgctaccccgaccacatgaagcagcacgacttcttcaagtccgccatgcccgaaggctacgtccaggagcgcaccatcttcttcaaggacgacggcaactacaagacccgcgccgaggtgaagttcgagggcgacaccctggtgaaccgcatcgagctgaagggcatcgacttcaaggaggacggcaacatcctggggcacaagctggagtacaactacaacagccacaacgtctatatcatggccgacaagcagaagaacggcatcaaggtgaacttcaagatccgccacaacatcgaggacggcagcgtgcagctcgccgaccactaccagcagaacacccccatcggcgacggccccgtgctgctgcccgacaaccactacctgagcacccagtccgccctgagcaaagaccccaacgagaagcgcgatcacatggtcctgctggagttcgtgaccgccgccgggatcactctcggcatggacgagctgtacaagtaggcgcgcagcgcttagacgtctcgcgatcgatgctagtgtgaaatagacatcagaattaagaaaaacgtagggtccaagtggttccccgttatggactcgctatctgtcaaccagatcttataccctgaagttcacctagatagcccgatagttaccaataagatagtagccatcctggagtatgctcgagtccctcacgcttacagcctggaggaccctacactgtgtcagaacatcaagcaccgcctaaaaaacggattttccaaccaaatgattataaacaatgtggaagttgggaatgtcatcaagtccaagcttaggagttatccggcccactctcatattccatatccaaattgtaatcaggatttatttaacatagaagacaaagagtcaacgaggaagatccgtgaactcctcaaaaaggggaattcgctgtactccaaagtcagtgataaggttttccaatgcttaagggacactaactcacggcttggcctaggctccgaattgagggaggacatcaaggagaaagttattaacttgggagtttacatgcacagctcccagtggtttgagccctttctgttttggtttacagtcaagactgagatgaggtcagtgattaaatcacaaacccatacttgccataggaggagacacacacctgtattcttcactggtagttcagttgagttgctaatctctcgtgaccttgttgctataatcagtaaagagtctcaacatgtatattacctgacatttgaactggttttgatgtattgtgatgtcatagaggggaggttaatgacagagaccgctatgactattgatgctaggtatacagagcttctaggaagagtcagatacatgtggaaactgatagatggtttcttccctgcactcgggaatccaacttatcaaattgtagccatgctggagcctctttcacttgcttacctgcagctgagggatataacagtagaactcagaggtgctttccttaaccactgctttactgaaatacatgatgttcttgaccaaaacgggttttctgatgaaggtacttatcatgagttaactgaagctctagattacattttcataactgatgacatacatctgacaggggagattttctcatttttcagaagtttcggccaccccagacttgaagcagtaacggctgctgaaaatgttaggaaatacatgaatcagcctaaagtcattgtgtatgagactctgatgaaaggtcatgccatattttgtggaatcataatcaacggctatcgtgacaggcacggaggcagttggccaccgctgaccctccccctgcatgctgcagacacaatccggaatgctcaagcttcaggtgaagggttaacacatgagcagtgcgttgataactggaaatcttttgctggagtgaaatttggctgctttatgcctcttagcctggatagtgatctgacaatgtacctaaaggacaaggcacttgctgctctccaaagggaatgggattcagtttacccgaaagagttcctgcgttacgaccctcccaagggaaccgggtcacggaggcttgtagatgttttccttaatgattcgagctttgacccatatgatgtgataatgtatgttgtaagtggagcttacctccatgaccctgagttcaacctgtcttacagcctgaaagaaaaggagatcaaggaaacaggtagactttttgctaaaatgacttacaaaatgagggcatgccaagtgattgctgaaaatctaatctcaaacgggattggcaaatattttaaggacaatgggatggccaaggatgagcacgatttgactaaggcactccacactctagctgtctcaggagtccccaaagatctcaaagaaagtcacaggggggggccagtcttaaaaacctactcccgaagcccagtccacacaagtaccaggaacgtgagagcagcaaaagggtttatagggttccctcaagtaattcggcaggaccaagacactgatcatccggagaatatggaagcttacgagacagtcagtgcatttatcacgactgatctcaagaagtactgccttaattggagatatgagaccatcagcttgtttgcacagaggctaaatgagatttacggattgccctcatttttccagtggctgcataagaggcttgagacctctgtcctgtatgtaagtgaccctcattgcccccccgaccttgacgcccatatcccgttatataaagtccccaatgatcaaatcttcattaagtaccctatgggaggtatagaagggtattgtcagaagctgtggaccatcagcaccattccctatctatacctggctgcttatgagagcggagtaaggattgcttcgttagtgcaaggggacaatcagaccatagccgtaacaaaaagggtacccagcacatggccctacaaccttaagaaacgggaagctgctagagtaactagagattactttgtaattcttaggcaaaggctacatgatattggccatcacctcaaggcaaatgagacaattgtttcatcacatttttttgtctattcaaaaggaatatattatgatgggctacttgtgtcccaatcactcaagagcatcgcaagatgtgtattctggtcagagactatagttgatgaaacaagggcagcatgcagtaatattgctacaacaatggctaaaagcatcgagagaggttatgaccgttaccttgcatattccctgaacgtcctaaaagtgatacagcaaattctgatctctcttggcttcacaatcaattcaaccatgacccgggatgtagtcatacccctcctcacaaacaacgacctcttaataaggatggcactgttgcccgctcctattggggggatgaattatctgaatatgagcaggctgtttgtcagaaacatcggtgatccagtaacatcatcaattgctgatctcaagagaatgattctcgcctcactaatgcctgaagagaccctccatcaagtaatgacacaacaaccgggggactcttcattcctagactgggctagcgacccttactcagcaaatcttgtatgtgtccagagcatcactagactcctcaagaacataactgcaaggtttgtcctgatccatagtccaaacccaatgttaaaaggattattccatgatgacagtaaagaagaggacgagggactggcggcattcctcatggacaggcatattatagtacctagggcagctcatgaaatcctggatcatagtgtcacaggggcaagagagtctattgcaggcatgctggataccacaaaaggcttgattcgagccagcatgaggaagggggggttaacctctcgagtgataaccagattgtccaattatgactatgaacaattcagagcagggatggtgctattgacaggaagaaagagaaatgtcctcattgacaaagagtcatgttcagtgcagctggcgagagctctaagaagccatatgtgggcgaggctagctcgaggacggcctatttacggccttgaggtccctgatgtactagaatctatgcgaggccaccttattcggcgtcatgagacatgtgtcatctgcgagtgtggatcagtcaactacggatggttttttgtcccctcgggttgccaactggatgatattgacaaggaaacatcatccttgagagtcccatatattggttctaccactgatgagagaacagacatgaagcttgccttcgtaagagccccaagtcgatccttgcgatctgctgttagaatagcaacagtgtactcatgggcttacggtgatgatgatagctcttggaacgaagcctggttgttggctaggcaaagggccaatgtgagcctggaggagctaagggtgatcactcccatctcaacttcgactaatttagcgcataggttgagggatcgtagcactcaagtgaaatactcaggtacatcccttgtccgagtggcgaggtataccacaatctccaacgacaatctctcatttgtcatatcagataagaaggttgatactaactttatataccaacaaggaatgcttctagggttgggtgttttagaaacattgtttcgactcgagaaagataccggatcatctaacacggtattacatcttcacgtcgaaacagattgttgcgtgatcccgatgatagatcatcccaggatacccagctcccgcaagctagagctgagggcagagctatgtaccaacccattgatatatgataatgcacctttaattgacagagatgcaacaaggctatacacccagagccataggaggcaccttgtggaatttgttacatggtccacaccccaactatatcacattttagctaagtccacagcactatctatgattgacctggtaacaaaatttgagaaggaccatatgaatgaaatttcagctctcataggggatgacgatatcaatagtttcataactgagtttctgctcatagagccaagattattcactatctacttgggccagtgtgcggccatcaattgggcatttgatgtacattatcatagaccatcagggaaatatcagatgggtgagctgttgtcatcgttcctttctagaatgagcaaaggagtgtttaaggtgcttgtcaatgctctaagccacccaaagatctacaagaaattctggcattgtggtattatagagcctatccatggtccttcacttgatgctcaaaacttgcacacaactgtgtgcaacatggtttacacatgctatatgacctacctcgacctgttgttgaatgaagagttagaagagttcacatttctcttgtgtgaaagcgacgaggatgtagtaccggacagattcgacaacatccaggcaaaacacttatgtgttctggcagatttgtactgtcaaccagggacctgcccaccaattcgaggtctaagaccggtagagaaatgtgcagttctaaccgaccatatcaaggcagaggctatgttatctccagcaggatcttcgtggaacataaatccaattattgtagaccattactcatgctctctgacttatctccggcgaggatcgatcaaacagataagattgagagttgatccaggattcattttcgacgccctcgctgaggtaaatgtcagtcagccaaagatcggcagcaacaacatctcaaatatgagcatcaaggctttcagacccccacacgatgatgttgcaaaattgctcaaagatatcaacacaagcaagcacaatcttcccatttcagggggcaatctcgccaattatgaaatccatgctttccgcagaatcgggttgaactcatctgcttgctacaaagctgttgagatatcaacattaattaggagatgccttgagccaggggaggacggcttgttcttgggtgagggatcgggttctatgttgatcacttataaagagatacttaaactaaacaagtgcttctataatagtggggtttccgccaattctagatctggtcaaagggaattagcaccctatccctccgaagttggccttgtcgaacacagaatgggagtaggtaatattgtcaaagtgctctttaacgggaggcccgaagtcacgtgggtaggcagtgtagattgcttcaatttcatagttagtaatatccctacctctagtgtggggtttatccattcagatatagagaccttgcctgacaaagatactatagagaagctagaggaattggcagccatcttatcgatggctctgctcctgggcaaaataggatcaatactggtgattaagcttatgcctttcagcggggattttgttcagggatttataagttatgtagggtctcattatagagaagtgaaccttgtataccctagatacagcaacttcatctctactgaatcttatttggttatgacagatctcaaggctaaccggctaatgaatcctgaaaagattaagcagcagataattgaatcatctgtgaggacttcacctggacttataggtcacatcctatccattaagcaactaagctgcatacaagcaattgtgggagacgcagttagtagaggtgatatcaatcctactctgaaaaaacttacacctatagagcaggtgctgatcaattgcgggttggcaattaacggacctaagctgtgcaaagaattgatccaccatgatgttgcctcagggcaagatggattgcttaattctatactcatcctctacagggagttggcaagattcaaagacaaccaaagaagtcaacaagggatgttccacgcttaccccgtattggtaagtagcaggcaacgagaacttatatctaggatcacccgcaaattctgggggcacattcttctttactccgggaacaaaaagttgataaataagtttatccagaatctcaagtccggctatctgatactagacttacaccagaatatcttcgttaagaatctatccaagtcagagaaacagattattatgacggggggtttgaaacgtgagtgggtttttaaggtaacagtcaaggagaccaaagaatggtataagttagtcggatacagtgccctgattaaggactaattggttgaactccggaaccctaatcctgccctaggtggttaggcattatttgcaatatattaaagaaaactttgaaaatacgaagtttctattcccagctttgtctggtggccggcatggtcccagcctcctcgctggcgccggctgggcaacattccgaggggaccgtcccctcggtaatggcgaatgggacgcggccgatccggctgctaacaaagcccgaaaggaagctgagttggctgctgccaccgctgagcaataactagcataaccccttggggcctctaaacgggtcttgaggggttttttgctgaaaggaggaactatatccggatgcggccgcgggccctatggtacccagcttttgttccctttagtgagggttaattccgagcttggcgtaatcatggtcatagctgtttcctgtgtgaaattgttatccgctcacaattccacacaacataggagccggaagcataaagtgtaaagcctggggtgcctaatgagtgaggtaactcacattaattgcgttgcgctcactgcccgctttccagtcgggaaacctgtcgtgccagctgcattaatgaatcggccaacgcgcggggagaggcggtttgcgtattgggcgctcttccgcttcctcgctcactgactcgctgcgctcggtcgttcggctgcggcgagcggtatcagctcactcaaaggcggtaatacggttatccacagaatcaggggataacgcaggaaagaacatgtgagcaaaaggccagcaaaaggccaggaaccgtaaaaaggccgcgttgctggcgtttttccataggctcggcccccctgacgagcatcacaaaaatcgacgctcaagtcagaggtggcgaaacccgacaggactataaagataccaggcgttcccccctggaagctccctcgtgcgctctcctgttccgaccctgccgcttaccggatacctgtccgcctttctcccttcgggaagcgtggcgctttctcaatgctcacgctgtaggtatctcagttcggtgtaggtcgttcgctccaagctgggctgtgtgcacgaaccccccgttcagcccgaccgctgcgccttatccggtaactatcgtcttgagtccaacccggtaagacacgacttatcgccactggcagcagccactggtaacaggattagcagagcgaggtatgtaggcggtgctacagagttcttgaagtggtggcctaactacggctacactagaaggacagtatttggtatctgcgctctgctgaagccagttaccttcggaaaaagagttggtagctcttgatccggcaaacaaaccaccgctggtagcggtggtttttttgtttgcaagcagcagattacgcgcagaaaaaaaggatctcaagaagatcctttgatcttttctacggggtctgacgctcagtggaacgaaaactcacgttaagggattttggtcatgagattatcaaaaaggatcttcacctagatccttttaaattaaaaatgaagttttaaatcaatctaaagtatatatgagtaaacttggtctgacagttaccaatgcttaatcagtgaggcacctatctcagcgatctgtctatttcgttcatccatagttgcctgactgcccgtcgtgtagataactacgatacgggagggcttaccatctggccccagtgctgcaatgataccgcgagacccacgctcaccggctccagatttatcagcaataaaccagccagccggaagggccgagcgcagaagtggtcctgcaactttatccgcctccatccagtctattaattgttgccgggaagctagagtaagtagttcgccagttaatagtttgcgcaacgttgttgccattgctacaggcatcgtggtgtcacgctcgtcgtttggtatggcttcattcagctccggttcccaacgatcaaggcgagttacatgatcccccatgttgtgaaaaaaagcggttagctccttcggtcctccgatcgttgtcagaagtaagttggccgcagtgttatcactcatgcttatggcagcactgcataattctcttactgtcatgccatccgtaagatgcttttctgtgactggtgagtactcaaccaagtcattctgagaatagtgtatgcggcgaccgagttgctcttgcccggcgtcaatacgggataataccgcgccacatagcagaactttaaaagtgctcatcattggaaaacgttcttcggggcgaaaactctcaaggatcttaccgctgttgagatccagttcgatgtaacccactcgtgcacccaactgatcttcagcatcttttactttcaccagcgtttctgggtgagcaaaaacaggaaggcaaaatgccgcaaaaaagggaataagggcgacacggaaatgttgaatactcatactcttcctttttcaatattattgaagcatttatcagggttattgtctcatgagcggatacatatttgaatgtatttagaaaaataaacaaataggggttccgcgcacatttccccgaaaagtgccacctgaaattgtaaacgttaatattttgttaaaattcgcgttaaatttttgttaaatcagctcattttttaaccaataggccgaaatcggcaaaatcccttataaatcaaaagaatagaccgagatagggttgagtgttgttccagtttggaacaagagtccactattaaagaacgtggactccaacgtcaaagggcgaaaaaccgtctatcagggcgatggcccactacgtgaaccatcaccctaatcaagttttttggggtcgaggtgccgtaaagcactaaatcggaaccctaaagggagcccccgatttagagcttgacggggaaagccggcgaacgtggcgagaaaggaagggaagaaagcgaaaggagcgggcgctagggcgctggcaagtgtagcggtcacgctgcgcgtaaccaccacacccgccgcgcttaatgcgccgctacagggcgcgtcccattcgccattcaggctgcgcaactgttgggaagggcgatcggtgcgggcctcttcgctattacgccagccaccgcggtggcggccgctaatacgactcactatagggccaactttgtttggtctgatgagtccgtgaggacgaaacccggagtcccgggtc

SEQ ID NO: 39 - DNA, 876 bp, Artificial sequence
  ATU1(eGFP)
cttaggattcaagatcctattatcagggacaagagcaggattagggatatccgagacgcgtacgatggtgagcaagggcgaggagctgttcaccggggtggtgcccatcctggtcgagctggacggcgacgtaaacggccacaagttcagcgtgtccggcgagggcgagggcgatgccacctacggcaagctgaccctgaagttcatctgcaccaccggcaagctgcccgtgccctggcccaccctcgtgaccaccctgacctacggcgtgcagtgcttcagccgctaccccgaccacatgaagcagcacgacttcttcaagtccgccatgcccgaaggctacgtccaggagcgcaccatcttcttcaaggacgacggcaactacaagacccgcgccgaggtgaagttcgagggcgacaccctggtgaaccgcatcgagctgaagggcatcgacttcaaggaggacggcaacatcctggggcacaagctggagtacaactacaacagccacaacgtctatatcatggccgacaagcagaagaacggcatcaaggtgaacttcaagatccgccacaacatcgaggacggcagcgtgcagctcgccgaccactaccagcagaacacccccatcggcgacggccccgtgctgctgcccgacaaccactacctgagcacccagtccgccctgagcaaagaccccaacgagaagcgcgatcacatggtcctgctggagttcgtgaccgccgccgggatcactctcggcatggacgagctgtacaagtaggcgcgcagcgcttagacgtctcgcgatcgattagtgcgagaggccgagggccagaacaacatccgcctaccatccatcattgttataaaaaa

SEQ ID NO: 40 - DNA, 828 bp, Artificial sequence
  ATU2(eGFP)
cctaccctccatcattgttataaaaaacttaggaaccaggtccacacagccgccagcccatcaacgcgtacgatggtgagcaagggcgaggagctgttcaccggggtggtgcccatcctggtcgagctggacggcgacgtaaacggccacaagttcagcgtgtccggcgagggcgagggcgatgccacctacggcaagctgaccctgaagttcatctgcaccaccggcaagctgcccgtgccctggcccaccctcgtgaccaccctgacctacggcgtgcagtgcttcagccgctaccccgaccacatgaagcagcacgacttcttcaagtccgccatgcccgaaggctacgtccaggagcgcaccatcttcttcaaggacgacggcaactacaagacccgcgccgaggtgaagttcgagggcgacaccctggtgaaccgcatcgagctgaagggcatcgacttcaaggaggacggcaacatcctggggcacaagctggagtacaactacaacagccacaacgtctatatcatggccgacaagcagaagaacggcatcaaggtgaacttcaagatccgccacaacatcgaggacggcagcgtgcagctcgccgaccactaccagcagaacacccccatcggcgacggccccgtgctgctgcccgacaaccactacctgagcacccagtccgccctgagcaaagaccccaacgagaagcgcgatcacatggtcctgctggagttcgtgaccgccgccgggatcactctcggcatggacgagctgtacaagtaggcgcgcagcgcttagacgtctcgcgatcgatactag

SEQ ID NO: 41 - DNA, 828 bp, Artificial sequence
  ATU3(eGFP)
ctagtctaccctccatcattgttataaaaaacttaggaaccaggtccacacagccgccagcccatcaacgcgtacgatggtgagcaagggcgaggagctgttcaccggggtggtgcccatcctggtcgagctggacggcgacgtaaacggccacaagttcagcgtgtccggcgagggcgagggcgatgccacctacggcaagctgaccctgaagttcatctgcaccaccggcaagctgcccgtgccctggcccaccctcgtgaccaccctgacctacggcgtgcagtgcttcagccgctaccccgaccacatgaagcagcacgacttcttcaagtccgccatgcccgaaggctacgtccaggagcgcaccatcttcttcaaggacgacggcaactacaagacccgcgccgaggtgaagttcgagggcgacaccctggtgaaccgcatcgagctgaagggcatcgacttcaaggaggacggcaacatcctggggcacaagctggagtacaactacaacagccacaacgtctatatcatggccgacaagcagaagaacggcatcaaggtgaacttcaagatccgccacaacatcgaggacggcagcgtgcagctcgccgaccactaccagcagaacacccccatcggcgacggccccgtgctgctgcccgacaaccactacctgagcacccagtccgccctgagcaaagaccccaacgagaagcgcgatcacatggtcctgctggagttcgtgaccgccgccgggatcactctcggcatggacgagctgtacaagtaggcgcgcagcgcttagacgtctcgcgatcgatg

SEQ ID NO: 42 - DNA, 3870 bp, Artificial sequence
  Codon-optimized nucleotide sequence of the S3F polypeptide of nCoV
gctagcagatctcgtacggccaccatgttcgtgtttctggtgctgctgccactggtgtccagtcagtgcgtgaacctgaccacacgaacacagctgccaccagcctacaccaatagcttcacccgcggagtgtactaccccgacaaggtgttccgcagcagcgtgctgcatagcacccaggatctgtttctgcccttcttcagcaacgtgacctggttccacgccatccacgtgtccggcaccaatggcaccaagcgcttcgataatcccgtgctgcccttcaacgatggcgtgtactttgccagcaccgagaagtccaatatcatccgcggctggatcttcggcaccacactggatagcaagacccagagcctgctgatcgtgaacaacgccaccaacgtggtcatcaaagtgtgcgagttccagttctgcaacgaccccttcctgggcgtctactaccacaagaacaacaagagctggatggaaagcgagttccgcgtgtacagcagcgccaacaactgcaccttcgagtacgtgtcccagccattcctgatggacctggaaggcaagcagggcaacttcaagaacctgcgcgagttcgtgttcaagaacatcgacggctacttcaaaatctacagcaagcacaccccaatcaacctcgtgcgcgatctgccacagggattcagtgctctggaacccctggtggatctgcccatcggcatcaacattacccgctttcagacactgctggccctgcaccgcagttacttgacaccaggcgatagcagcagtggatggacagctggtgccgccgcttactacgttggatatctgcagccacgcacctttctgctgaagtacaacgagaacggcaccatcaccgacgccgtggattgtgctctcgatcccctgagcgagacaaagtgcaccctgaagtccttcaccgtcgagaagggcatctaccagaccagcaatttccgcgtgcagcccaccgagagcatcgtgcgcttccccaatatcaccaatctgtgccccttcggcgaggtgttcaatgccacacgctttgcctccgtgtacgcctggaatcgcaagcgcattagcaactgcgtggccgactactccgtgctgtacaatagcgccagcttcagcaccttcaagtgctacggcgtgtcacccaccaagctgaacgacctgtgcttcaccaatgtgtacgccgacagcttcgtgatccgcggagatgaagtgcgacagattgccccaggccagaccggcaagatcgccgactacaattacaagctgcccgacgacttcaccggctgcgtgatcgcctggaacagcaacaacctggattccaaagtcggcggcaactacaactacctgtaccgcctgttccgcaagagcaatctgaagcccttcgagcgcgacatcagcaccgaaatctaccaggccggaagcaccccatgcaacggcgtggaaggcttcaactgctacttcccactgcagtcctacggatttcagcccacaaatggcgtgggctaccagccatatcgagtggtggtgctgagcttcgaactgctgcatgctccagctaccgtgtgcggccccaagaagagtaccaacctggtcaagaacaaatgcgtgaacttcaacttcaacggcctgaccggaaccggcgtgctgaccgagagtaacaagaagttcctgccattccagcagtttggccgcgacattgccgatacaaccgatgccgttcgcgatccccagaccttggagatcctggatattaccccatgctccttcggcggcgtgtccgtgattacaccaggcaccaataccagcaaccaggtggccgttctgtaccaggatgtgaattgcacagaggtgcccgtggccattcacgccgatcaattgacaccaacatggcgcgtgtactccaccggcagcaatgtgtttcaaacccgcgctggatgcctgattggagccgagcacgtgaacaatagctacgagtgcgatatccccatcggagccggaatctgcgcctcctatcagacccagaccaatagtccaggatccgccggaagtgtggccagccagagcatcattgcctataccatgagcctgggcgccgagaatagcgtggcctactccaacaacagcattgctatccccaccaacttcaccatcagcgtgaccaccgagatcctgccagtgtccatgaccaagaccagcgtggactgcaccatgtacatctgcggagatagcaccgagtgcagcaacctgctgctgcagtacggaagtttctgcacccagctgaatcgcgccctgacaggcattgccgtggaacaggataagaacacccaagaggtgttcgcccaagtgaagcaaatctacaagaccccaccaatcaaggatttcggcggcttcaatttcagccagattctgcccgatccaagcaagcccagcaagcgcagcttcatcgaggacctgctgttcaacaaagtgacactggccgacgccggattcatcaagcagtatggcgattgcctgggcgatattgccgcacgcgatctgatttgcgcccagaagtttaacggactgaccgtcctgccaccactgctgacagatgagatgatcgcccagtacacaagtgccctgctggccggaaccattaccagcggatggacatttggagccggtgccgctctgcagattcccttcgctatgcagatggcctaccgcttcaatggcattggcgtgacccagaatgtgctgtacgagaaccagaagctgatcgccaaccagttcaacagcgccatcggcaagattcaggacagcctgagtagtaccgccagcgctctgggaaagctgcaggatgtggtcaaccagaacgctcaggccctgaacaccctggttaagcagctgagcagcaacttcggcgccatcagtagcgtgctgaacgatatcctgagccgcctggataaggtggaagccgaggtgcagatcgatcgcctgattaccggacgcctgcagtccctgcagacctatgtgacacagcagctgatccgagccgccgagattcgagctagtgctaatctggccgccaccaagatgagcgaatgtgtgctgggacagagcaagcgcgtggacttttgcggcaagggataccacctgatgagcttcccacagagtgctccacacggcgtggtgtttctgcatgtgacctacgtgcccgctcaagagaagaatttcaccaccgctccagccatctgccacgacggaaaggcccattttccacgcgagggcgtgttcgttagcaacggcactcattggttcgtcacccagcgcaacttctacgagccccagatcatcaccaccgacaacaccttcgtcagcggcaactgcgacgtcgtgatcggcattgtgaacaacaccgtgtacgatccactgcagcccgagctggacagcttcaaagaggaactggacaagtactttaagaaccacacaagccccgacgtggacctgggagacattagcggaatcaacgccagcgtggtcaacatccagaaagagattgaccgcctgaacgaggtggccaagaatctgaacgagagcctgatcgacctgcaagaactgggcaaatacgagcagtacattaagtggccctggtacatctggctgggcttcattgccggactgattgccatcgtgatggtcaccattatgctgtgctgcatgaccagttgctgcagctgcctgaagggatgctgcagttgcggaagctgctgcaagttcgacgaggatgatagcgagccagtgctgaagggcgtcaagctgcactacacctgataacgagcgcgcctcgaggaattc

SEQ ID NO: 43 - protein, 1273 aa, Artificial sequence
  S3F polypeptide of nCoV
MFVFLVLLPLVSSQCVNLTTRTQLPPAYTNSFTRGVYYPDKVFRSSVLHSTQDLFLPFFSNVTWFHAIHVSGTNGTKRFDNPVLPFNDGVYFASTEKSNIIRGWIFGTTLDSKTQSLLIVNNATNVVIKVCEFQFCNDPFLGVYYHKNNKSWMESEFRVYSSANNCTFEYVSQPFLMDLEGKQGNFKNLREFVFKNIDGYFKIYSKHTPINLVRDLPQGFSALEPLVDLPIGINITRFQTLLALHRSYLTPGDSSSGWTAGAAAYYVGYLQPRTFLLKYNENGTITDAVDCALDPLSETKCTLKSFTVEKGIYQTSNFRVQPTESIVRFPNITNLCPFGEVFNATRFASVYAWNRKRISNCVADYSVLYNSASFSTFKCYGVSPTKLNDLCFTNVYADSFVIRGDEVRQIAPGQTGKIADYNYKLPDDFTGCVIAWNSNNLDSKVGGNYNYLYRLFRKSNLKPFERDISTEIYQAGSTPCNGVEGFNCYFPLQSYGFQPTNGVGYQPYRVVVLSFELLHAPATVCGPKKSTNLVKNKCVNFNFNGLTGTGVLTESNKKFLPFQQFGRDIADTTDAVRDPQTLEILDITPCSFGGVSVITPGTNTSNQVAVLYQDVNCTEVPVAIHADQLTPTWRVYSTGSNVFQTRAGCLIGAEHVNNSYECDIPIGAGICASYQTQTNSPGSAGSVASQSIIAYTMSLGAENSVAYSNNSIAIPTNFTISVTTEILPVSMTKTSVDCTMYICGDSTECSNLLLQYGSFCTQLNRALTGIAVEQDKNTQEVFAQVKQIYKTPPIKDFGGFNFSQILPDPSKPSKRSFIEDLLFNKVTLADAGFIKQYGDCLGDIAARDLICAQKFNGLTVLPPLLTDEMIAQYTSALLAGTITSGWTFGAGAALQIPFAMQMAYRFNGIGVTQNVLYENQKLIANQFNSAIGKIQDSLSSTASALGKLQDVVNQNAQALNTLVKQLSSNFGAISSVLNDILSRLDKVEAEVQIDRLITGRLQSLQTYVTQQLIRAAEIRASANLAATKMSECVLGQSKRVDFCGKGYHLMSFPQSAPHGVVFLHVTYVPAQEKNFTTAPAICHDGKAHFPREGVFVSNGTHWFVTQRNFYEPQIITTDNTFVSGNCDVVIGIVNNTVYDPLQPELDSFKEELDKYFKNHTSPDVDLGDISGINASVVNIQKEIDRLNEVAKNLNESLIDLQELGKYEQYIKWPWYIWLGFIAGLIAIVMVTIMLCCMTSCCSCLKGCCSCGSCCKFDEDDSEPVLKGVKLHYT

SEQ ID NO: 44 - DNA, 3870 bp, Artificial sequence
  Codon-optimized nucleotide sequence of the S2P3F polypeptide of nCoV
gctagcagatctcgtacggccaccatgttcgtgtttctggtgctgctgccactggtgtccagtcagtgcgtgaacctgaccacacgaacacagctgccaccagcctacaccaatagcttcacccgcggagtgtactaccccgacaaggtgttccgcagcagcgtgctgcatagcacccaggatctgtttctgcccttcttcagcaacgtgacctggttccacgccatccacgtgtccggcaccaatggcaccaagcgcttcgataatcccgtgctgcccttcaacgatggcgtgtactttgccagcaccgagaagtccaatatcatccgcggctggatcttcggcaccacactggatagcaagacccagagcctgctgatcgtgaacaacgccaccaacgtggtcatcaaagtgtgcgagttccagttctgcaacgaccccttcctgggcgtctactaccacaagaacaacaagagctggatggaaagcgagttccgcgtgtacagcagcgccaacaactgcaccttcgagtacgtgtcccagccattcctgatggacctggaaggcaagcagggcaacttcaagaacctgcgcgagttcgtgttcaagaacatcgacggctacttcaaaatctacagcaagcacaccccaatcaacctcgtgcgcgatctgccacagggattcagtgctctggaacccctggtggatctgcccatcggcatcaacattacccgctttcagacactgctggccctgcaccgcagttacttgacaccaggcgatagcagcagtggatggacagctggtgccgccgcttactacgttggatatctgcagccacgcacctttctgctgaagtacaacgagaacggcaccatcaccgacgccgtggattgtgctctcgatcccctgagcgagacaaagtgcaccctgaagtccttcaccgtcgagaagggcatctaccagaccagcaatttccgcgtgcagcccaccgagagcatcgtgcgcttccccaatatcaccaatctgtgccccttcggcgaggtgttcaatgccacacgctttgcctccgtgtacgcctggaatcgcaagcgcattagcaactgcgtggccgactactccgtgctgtacaatagcgccagcttcagcaccttcaagtgctacggcgtgtcacccaccaagctgaacgacctgtgcttcaccaatgtgtacgccgacagcttcgtgatccgcggagatgaagtgcgacagattgccccaggccagaccggcaagatcgccgactacaattacaagctgcccgacgacttcaccggctgcgtgatcgcctggaacagcaacaacctggattccaaagtcggcggcaactacaactacctgtaccgcctgttccgcaagagcaatctgaagcccttcgagcgcgacatcagcaccgaaatctaccaggccggaagcaccccatgcaacggcgtggaaggcttcaactgctacttcccactgcagtcctacggatttcagcccacaaatggcgtgggctaccagccatatcgagtggtggtgctgagcttcgaactgctgcatgctccagctaccgtgtgcggccccaagaagagtaccaacctggtcaagaacaaatgcgtgaacttcaacttcaacggcctgaccggaaccggcgtgctgaccgagagtaacaagaagttcctgccattccagcagtttggccgcgacattgccgatacaaccgatgccgttcgcgatccccagaccttggagatcctggatattaccccatgctccttcggcggcgtgtccgtgattacaccaggcaccaataccagcaaccaggtggccgttctgtaccaggatgtgaattgcacagaggtgcccgtggccattcacgccgatcaattgacaccaacatggcgcgtgtactccaccggcagcaatgtgtttcaaacccgcgctggatgcctgattggagccgagcacgtgaacaatagctacgagtgcgatatccccatcggagccggaatctgcgcctcctatcagacccagaccaatagtccaggatccgccggaagtgtggccagccagagcatcattgcctataccatgagcctgggcgccgagaatagcgtggcctactccaacaacagcattgctatccccaccaacttcaccatcagcgtgaccaccgagatcctgccagtgtccatgaccaagaccagcgtggactgcaccatgtacatctgcggagatagcaccgagtgcagcaacctgctgctgcagtacggaagtttctgcacccagctgaatcgcgccctgacaggcattgccgtggaacaggataagaacacccaagaggtgttcgcccaagtgaagcaaatctacaagaccccaccaatcaaggatttcggcggcttcaatttcagccagattctgcccgatccaagcaagcccagcaagcgcagcttcatcgaggacctgctgttcaacaaagtgacactggccgacgccggattcatcaagcagtatggcgattgcctgggcgatattgccgcacgcgatctgatttgcgcccagaagtttaacggactgaccgtcctgccaccactgctgacagatgagatgatcgcccagtacacaagtgccctgctggccggaaccattaccagcggatggacatttggagccggtgccgctctgcagattcccttcgctatgcagatggcctaccgcttcaatggcattggcgtgacccagaatgtgctgtacgagaaccagaagctgatcgccaaccagttcaacagcgccatcggcaagattcaggacagcctgagtagtaccgccagcgctctgggaaagctgcaggatgtggtcaaccagaacgctcaggccctgaacaccctggttaagcagctgagcagcaacttcggcgccatcagtagcgtgctgaacgatatcctgagccgcctggatccaccagaagccgaggtgcagatcgatcgcctgattaccggacgcctgcagtccctgcagacctatgtgacacagcagctgatccgagccgccgagattcgagctagtgctaatctggccgccaccaagatgagcgaatgtgtgctgggacagagcaagcgcgtggacttttgcggcaagggataccacctgatgagcttcccacagagtgctccacacggcgtggtgtttctgcatgtgacctacgtgcccgctcaagagaagaatttcaccaccgctccagccatctgccacgacggaaaggcccattttccacgcgagggcgtgttcgttagcaacggcactcattggttcgtcacccagcgcaacttctacgagccccagatcatcaccaccgacaacaccttcgtcagcggcaactgcgacgtcgtgatcggcattgtgaacaacaccgtgtacgatccactgcagcccgagctggacagcttcaaagaggaactggacaagtactttaagaaccacacaagccccgacgtggacctgggagacattagcggaatcaacgccagcgtggtcaacatccagaaagagattgaccgcctgaacgaggtggccaagaatctgaacgagagcctgatcgacctgcaagaactgggcaaatacgagcagtacattaagtggccctggtacatctggctgggcttcattgccggactgattgccatcgtgatggtcaccattatgctgtgctgcatgaccagttgctgcagctgcctgaagggatgctgcagttgcggaagctgctgcaagttcgacgaggatgatagcgagccagtgctgaagggcgtcaagctgcactacacctgataacgagcgcgcctcgaggaattc

SEQ ID NO: 45 - protein, 1273 aa, Artificial sequence
  S2P3F polypeptide of nCoV
MFVFLVLLPLVSSQCVNLTTRTQLPPAYTNSFTRGVYYPDKVFRSSVLHSTQDLFLPFFSNVTWFHAIHVSGTNGTKRFDNPVLPFNDGVYFASTEKSNIIRGWIFGTTLDSKTQSLLIVNNATNVVIKVCEFQFCNDPFLGVYYHKNNKSWMESEFRVYSSANNCTFEYVSQPFLMDLEGKQGNFKNLREFVFKNIDGYFKIYSKHTPINLVRDLPQGFSALEPLVDLPIGINITRFQTLLALHRSYLTPGDSSSGWTAGAAAYYVGYLQPRTFLLKYNENGTITDAVDCALDPLSETKCTLKSFTVEKGIYQTSNFRVQPTESIVRFPNITNLCPFGEVFNATRFASVYAWNRKRISNCVADYSVLYNSASFSTFKCYGVSPTKLNDLCFTNVYADSFVIRGDEVRQIAPGQTGKIADYNYKLPDDFTGCVIAWNSNNLDSKVGGNYNYLYRLFRKSNLKPFERDISTEIYQAGSTPCNGVEGFNCYFPLQSYGFQPTNGVGYQPYRVVVLSFELLHAPATVCGPKKSTNLVKNKCVNFNFNGLTGTGVLTESNKKFLPFQQFGRDIADTTDAVRDPQTLEILDITPCSFGGVSVITPGTNTSNQVAVLYQDVNCTEVPVAIHADQLTPTWRVYSTGSNVFQTRAGCLIGAEHVNNSYECDIPIGAGICASYQTQTNSPGSAGSVASQSIIAYTMSLGAENSVAYSNNSIAIPTNFTISVTTEILPVSMTKTSVDCTMYICGDSTECSNLLLQYGSFCTQLNRALTGIAVEQDKNTQEVFAQVKQIYKTPPIKDFGGFNFSQILPDPSKPSKRSFIEDLLFNKVTLADAGFIKQYGDCLGDIAARDLICAQKFNGLTVLPPLLTDEMIAQYTSALLAGTITSGWTFGAGAALQIPFAMQMAYRFNGIGVTQNVLYENQKLIANQFNSAIGKIQDSLSSTASALGKLQDVVNQNAQALNTLVKQLSSNFGAISSVLNDILSRLDPPEAEVQIDRLITGRLQSLQTYVTQQLIRAAEIRASANLAATKMSECVLGQSKRVDFCGKGYHLMSFPQSAPHGVVFLHVTYVPAQEKNFTTAPAICHDGKAHFPREGVFVSNGTHWFVTQRNFYEPQIITTDNTFVSGNCDVVIGIVNNTVYDPLQPELDSFKEELDKYFKNHTSPDVDLGDISGINASVVNIQKEIDRLNEVAKNLNESLIDLQELGKYEQYIKWPWYIWLGFIAGLIAIVMVTIMLCCMTSCCSCLKGCCSCGSCCKFDEDDSEPVLKGVKLHYT

SEQ ID NO: 46 - DNA, 3834 bp, Artificial sequence
  Codon-optimized nucleotide sequence of the S2PdeltaF polypeptide of nCoV
gctagcagatctcgtacggccaccatgttcgtgtttctggtgctgctgccactggtgtccagtcagtgcgtgaacctgaccacacgaacacagctgccaccagcctacaccaatagcttcacccgcggagtgtactaccccgacaaggtgttccgcagcagcgtgctgcatagcacccaggatctgtttctgcccttcttcagcaacgtgacctggttccacgccatccacgtgtccggcaccaatggcaccaagcgcttcgataatcccgtgctgcccttcaacgatggcgtgtactttgccagcaccgagaagtccaatatcatccgcggctggatcttcggcaccacactggatagcaagacccagagcctgctgatcgtgaacaacgccaccaacgtggtcatcaaagtgtgcgagttccagttctgcaacgaccccttcctgggcgtctactaccacaagaacaacaagagctggatggaaagcgagttccgcgtgtacagcagcgccaacaactgcaccttcgagtacgtgtcccagccattcctgatggacctggaaggcaagcagggcaacttcaagaacctgcgcgagttcgtgttcaagaacatcgacggctacttcaaaatctacagcaagcacaccccaatcaacctcgtgcgcgatctgccacagggattcagtgctctggaacccctggtggatctgcccatcggcatcaacattacccgctttcagacactgctggccctgcaccgcagttacttgacaccaggcgatagcagcagtggatggacagctggtgccgccgcttactacgttggatatctgcagccacgcacctttctgctgaagtacaacgagaacggcaccatcaccgacgccgtggattgtgctctcgatcccctgagcgagacaaagtgcaccctgaagtccttcaccgtcgagaagggcatctaccagaccagcaatttccgcgtgcagcccaccgagagcatcgtgcgcttccccaatatcaccaatctgtgccccttcggcgaggtgttcaatgccacacgctttgcctccgtgtacgcctggaatcgcaagcgcattagcaactgcgtggccgactactccgtgctgtacaatagcgccagcttcagcaccttcaagtgctacggcgtgtcacccaccaagctgaacgacctgtgcttcaccaatgtgtacgccgacagcttcgtgatccgcggagatgaagtgcgacagattgccccaggccagaccggcaagatcgccgactacaattacaagctgcccgacgacttcaccggctgcgtgatcgcctggaacagcaacaacctggattccaaagtcggcggcaactacaactacctgtaccgcctgttccgcaagagcaatctgaagcccttcgagcgcgacatcagcaccgaaatctaccaggccggaagcaccccatgcaacggcgtggaaggcttcaactgctacttcccactgcagtcctacggatttcagcccacaaatggcgtgggctaccagccatatcgagtggtggtgctgagcttcgaactgctgcatgctccagctaccgtgtgcggccccaagaagagtaccaacctggtcaagaacaaatgcgtgaacttcaacttcaacggcctgaccggaaccggcgtgctgaccgagagtaacaagaagttcctgccattccagcagtttggccgcgacattgccgatacaaccgatgccgttcgcgatccccagaccttggagatcctggatattaccccatgctccttcggcggcgtgtccgtgattacaccaggcaccaataccagcaaccaggtggccgttctgtaccaggatgtgaattgcacagaggtgcccgtggccattcacgccgatcaattgacaccaacatggcgcgtgtactccaccggcagcaatgtgtttcaaacccgcgctggatgcctgattggagccgagcacgtgaacaatagctacgagtgcgatatccccatcggagccggaatctgcgcatcctatagtgtggccagccagagcatcattgcctataccatgagcctgggcgccgagaatagcgtggcctactccaacaacagcattgctatccccaccaacttcaccatcagcgtgaccaccgagatcctgccagtgtccatgaccaagaccagcgtggactgcaccatgtacatctgcggagatagcaccgagtgcagcaacctgctgctgcagtacggaagtttctgcacccagctgaatcgcgccctgacaggcattgccgtggaacaggataagaacacccaagaggtgttcgcccaagtgaagcaaatctacaagaccccaccaatcaaggatttcggcggcttcaatttcagccagattctgcccgatccaagcaagcccagcaagcgcagcttcatcgaggacctgctgttcaacaaagtgacactggccgacgccggattcatcaagcagtatggcgattgcctgggcgatattgccgcacgcgatctgatttgcgcccagaagtttaacggactgaccgtcctgccaccactgctgacagatgagatgatcgcccagtacacaagtgccctgctggccggaaccattaccagcggatggacatttggagccggtgccgctctgcagattcccttcgctatgcagatggcctaccgcttcaatggcattggcgtgacccagaatgtgctgtacgagaaccagaagctgatcgccaaccagttcaacagcgccatcggcaagattcaggacagcctgagtagtaccgccagcgctctgggaaagctgcaggatgtggtcaaccagaacgctcaggccctgaacaccctggttaagcagctgagcagcaacttcggcgccatcagtagcgtgctgaacgatatcctgagccgcctggatccaccagaagccgaggtgcagatcgatcgcctgattaccggacgcctgcagtccctgcagacctatgtgacacagcagctgatccgagccgccgagattcgagctagtgctaatctggccgccaccaagatgagcgaatgtgtgctgggacagagcaagcgcgtggacttttgcggcaagggataccacctgatgagcttcccacagagtgctccacacggcgtggtgtttctgcatgtgacctacgtgcccgctcaagagaagaatttcaccaccgctccagccatctgccacgacggaaaggcccattttccacgcgagggcgtgttcgttagcaacggcactcattggttcgtcacccagcgcaacttctacgagccccagatcatcaccaccgacaacaccttcgtcagcggcaactgcgacgtcgtgatcggcattgtgaacaacaccgtgtacgatccactgcagcccgagctggacagcttcaaagaggaactggacaagtactttaagaaccacacaagccccgacgtggacctgggagacattagcggaatcaacgccagcgtggtcaacatccagaaagagattgaccgcctgaacgaggtggccaagaatctgaacgagagcctgatcgacctgcaagaactgggcaaatacgagcagtacattaagtggccctggtacatctggctgggcttcattgccggactgattgccatcgtgatggtcaccattatgctgtgctgcatgaccagttgctgcagctgcctgaagggatgctgcagttgcggaagctgctgcaagttcgacgaggatgatagcgagccagtgctgaagggcgtcaagctgcactacacctgataagcgcgcctcgaggaattc

SEQ ID NO: 47 - protein, 1262 aa, Artificial sequence
  S2PdeltaF polypeptide of nCoV
MFVFLVLLPLVSSQCVNLTTRTQLPPAYTNSFTRGVYYPDKVFRSSVLHSTQDLFLPFFSNVTWFHAIHVSGTNGTKRFDNPVLPFNDGVYFASTEKSNIIRGWIFGTTLDSKTQSLLIVNNATNVVIKVCEFQFCNDPFLGVYYHKNNKSWMESEFRVYSSANNCTFEYVSQPFLMDLEGKQGNFKNLREFVFKNIDGYFKIYSKHTPINLVRDLPQGFSALEPLVDLPIGINITRFQTLLALHRSYLTPGDSSSGWTAGAAAYYVGYLQPRTFLLKYNENGTITDAVDCALDPLSETKCTLKSFTVEKGIYQTSNFRVQPTESIVRFPNITNLCPFGEVFNATRFASVYAWNRKRISNCVADYSVLYNSASFSTFKCYGVSPTKLNDLCFTNVYADSFVIRGDEVRQIAPGQTGKIADYNYKLPDDFTGCVIAWNSNNLDSKVGGNYNYLYRLFRKSNLKPFERDISTEIYQAGSTPCNGVEGFNCYFPLQSYGFQPTNGVGYQPYRVVVLSFELLHAPATVCGPKKSTNLVKNKCVNFNFNGLTGTGVLTESNKKFLPFQQFGRDIADTTDAVRDPQTLEILDITPCSFGGVSVITPGTNTSNQVAVLYQDVNCTEVPVAIHADQLTPTWRVYSTGSNVFQTRAGCLIGAEHVNNSYECDIPIGAGICASYSVASQSIIAYTMSLGAENSVAYSNNSIAIPTNFTISVTTEILPVSMTKTSVDCTMYICGDSTECSNLLLQYGSFCTQLNRALTGIAVEQDKNTQEVFAQVKQIYKTPPIKDFGGFNFSQILPDPSKPSKRSFIEDLLFNKVTLADAGFIKQYGDCLGDIAARDLICAQKFNGLTVLPPLLTDEMIAQYTSALLAGTITSGWTFGAGAALQIPFAMQMAYRFNGIGVTQNVLYENQKLIANQFNSAIGKIQDSLSSTASALGKLQDVVNQNAQALNTLVKQLSSNFGAISSVLNDILSRLDPPEAEVQIDRLITGRLQSLQTYVTQQLIRAAEIRASANLAATKMSECVLGQSKRVDFCGKGYHLMSFPQSAPHGVVFLHVTYVPAQEKNFTTAPAICHDGKAHFPREGVFVSNGTHWFVTQRNFYEPQIITTDNTFVSGNCDVVIGIVNNTVYDPLQPELDSFKEELDKYFKNHTSPDVDLGDISGINASVVNIQKEIDRLNEVAKNLNESLIDLQELGKYEQYIKWPWYIWLGFIAGLIAIVMVTIMLCCMTSCCSCLKGCCSCGSCCKFDEDDSEPVLKGVKLHYT

SEQ ID NO: 48 - DNA, 3834 bp, Artificial sequence
  Codon-optimized nucleotide sequence of the S2PdeltaF2A polypeptide of nCoV
gctagcagatctcgtacggccaccatgttcgtgtttctggtgctgctgccactggtgtccagtcagtgcgtgaacctgaccacacgaacacagctgccaccagcctacaccaatagcttcacccgcggagtgtactaccccgacaaggtgttccgcagcagcgtgctgcatagcacccaggatctgtttctgcccttcttcagcaacgtgacctggttccacgccatccacgtgtccggcaccaatggcaccaagcgcttcgataatcccgtgctgcccttcaacgatggcgtgtactttgccagcaccgagaagtccaatatcatccgcggctggatcttcggcaccacactggatagcaagacccagagcctgctgatcgtgaacaacgccaccaacgtggtcatcaaagtgtgcgagttccagttctgcaacgaccccttcctgggcgtctactaccacaagaacaacaagagctggatggaaagcgagttccgcgtgtacagcagcgccaacaactgcaccttcgagtacgtgtcccagccattcctgatggacctggaaggcaagcagggcaacttcaagaacctgcgcgagttcgtgttcaagaacatcgacggctacttcaaaatctacagcaagcacaccccaatcaacctcgtgcgcgatctgccacagggattcagtgctctggaacccctggtggatctgcccatcggcatcaacattacccgctttcagacactgctggccctgcaccgcagttacttgacaccaggcgatagcagcagtggatggacagctggtgccgccgcttactacgttggatatctgcagccacgcacctttctgctgaagtacaacgagaacggcaccatcaccgacgccgtggattgtgctctcgatcccctgagcgagacaaagtgcaccctgaagtccttcaccgtcgagaagggcatctaccagaccagcaatttccgcgtgcagcccaccgagagcatcgtgcgcttccccaatatcaccaatctgtgccccttcggcgaggtgttcaatgccacacgctttgcctccgtgtacgcctggaatcgcaagcgcattagcaactgcgtggccgactactccgtgctgtacaatagcgccagcttcagcaccttcaagtgctacggcgtgtcacccaccaagctgaacgacctgtgcttcaccaatgtgtacgccgacagcttcgtgatccgcggagatgaagtgcgacagattgccccaggccagaccggcaagatcgccgactacaattacaagctgcccgacgacttcaccggctgcgtgatcgcctggaacagcaacaacctggattccaaagtcggcggcaactacaactacctgtaccgcctgttccgcaagagcaatctgaagcccttcgagcgcgacatcagcaccgaaatctaccaggccggaagcaccccatgcaacggcgtggaaggcttcaactgctacttcccactgcagtcctacggatttcagcccacaaatggcgtgggctaccagccatatcgagtggtggtgctgagcttcgaactgctgcatgctccagctaccgtgtgcggccccaagaagagtaccaacctggtcaagaacaaatgcgtgaacttcaacttcaacggcctgaccggaaccggcgtgctgaccgagagtaacaagaagttcctgccattccagcagtttggccgcgacattgccgatacaaccgatgccgttcgcgatccccagaccttggagatcctggatattaccccatgctccttcggcggcgtgtccgtgattacaccaggcaccaataccagcaaccaggtggccgttctgtaccaggatgtgaattgcacagaggtgcccgtggccattcacgccgatcaattgacaccaacatggcgcgtgtactccaccggcagcaatgtgtttcaaacccgcgctggatgcctgattggagccgagcacgtgaacaatagctacgagtgcgatatccccatcggagccggaatctgcgcatcctatagtgtggccagccagagcatcattgcctataccatgagcctgggcgccgagaatagcgtggcctactccaacaacagcattgctatccccaccaacttcaccatcagcgtgaccaccgagatcctgccagtgtccatgaccaagaccagcgtggactgcaccatgtacatctgcggagatagcaccgagtgcagcaacctgctgctgcagtacggaagtttctgcacccagctgaatcgcgccctgacaggcattgccgtggaacaggataagaacacccaagaggtgttcgcccaagtgaagcaaatctacaagaccccaccaatcaaggatttcggcggcttcaatttcagccagattctgcccgatccaagcaagcccagcaagcgcagcttcatcgaggacctgctgttcaacaaagtgacactggccgacgccggattcatcaagcagtatggcgattgcctgggcgatattgccgcacgcgatctgatttgcgcccagaagtttaacggactgaccgtcctgccaccactgctgacagatgagatgatcgcccagtacacaagtgccctgctggccggaaccattaccagcggatggacatttggagccggtgccgctctgcagattcccttcgctatgcagatggcctaccgcttcaatggcattggcgtgacccagaatgtgctgtacgagaaccagaagctgatcgccaaccagttcaacagcgccatcggcaagattcaggacagcctgagtagtaccgccagcgctctgggaaagctgcaggatgtggtcaaccagaacgctcaggccctgaacaccctggttaagcagctgagcagcaacttcggcgccatcagtagcgtgctgaacgatatcctgagccgcctggatccaccagaagccgaggtgcagatcgatcgcctgattaccggacgcctgcagtccctgcagacctatgtgacacagcagctgatccgagccgccgagattcgagctagtgctaatctggccgccaccaagatgagcgaatgtgtgctgggacagagcaagcgcgtggacttttgcggcaagggataccacctgatgagcttcccacagagtgctccacacggcgtggtgtttctgcatgtgacctacgtgcccgctcaagagaagaatttcaccaccgctccagccatctgccacgacggaaaggcccattttccacgcgagggcgtgttcgttagcaacggcactcattggttcgtcacccagcgcaacttctacgagccccagatcatcaccaccgacaacaccttcgtcagcggcaactgcgacgtcgtgatcggcattgtgaacaacaccgtgtacgatccactgcagcccgagctggacagcttcaaagaggaactggacaagtactttaagaaccacacaagccccgacgtggacctgggagacattagcggaatcaacgccagcgtggtcaacatccagaaagagattgaccgcctgaacgaggtggccaagaatctgaacgagagcctgatcgacctgcaagaactgggcaaatacgagcagtacattaagtggccctggtacatctggctgggcttcattgccggactgattgccatcgtgatggtcaccattatgctgtgctgcatgaccagttgctgcagctgcctgaagggatgctgcagttgcggaagctgctgcaagttcgacgaggatgatagcgagccagtgctgaagggcgtcgccctggcctacacctgataagcgcgcctcgaggaattc

SEQ ID NO: 49 - protein, 1262 aa, Artificial sequence
  S2PdeltaF2A polypeptide of nCoV
MFVFLVLLPLVSSQCVNLTTRTQLPPAYTNSFTRGVYYPDKVFRSSVLHSTQDLFLPFFSNVTWFHAIHVSGTNGTKRFDNPVLPFNDGVYFASTEKSNIIRGWIFGTTLDSKTQSLLIVNNATNVVIKVCEFQFCNDPFLGVYYHKNNKSWMESEFRVYSSANNCTFEYVSQPFLMDLEGKQGNFKNLREFVFKNIDGYFKIYSKHTPINLVRDLPQGFSALEPLVDLPIGINITRFQTLLALHRSYLTPGDSSSGWTAGAAAYYVGYLQPRTFLLKYNENGTITDAVDCALDPLSETKCTLKSFTVEKGIYQTSNFRVQPTESIVRFPNITNLCPFGEVFNATRFASVYAWNRKRISNCVADYSVLYNSASFSTFKCYGVSPTKLNDLCFTNVYADSFVIRGDEVRQIAPGQTGKIADYNYKLPDDFTGCVIAWNSNNLDSKVGGNYNYLYRLFRKSNLKPFERDISTEIYQAGSTPCNGVEGFNCYFPLQSYGFQPTNGVGYQPYRVVVLSFELLHAPATVCGPKKSTNLVKNKCVNFNFNGLTGTGVLTESNKKFLPFQQFGRDIADTTDAVRDPQTLEILDITPCSFGGVSVITPGTNTSNQVAVLYQDVNCTEVPVAIHADQLTPTWRVYSTGSNVFQTRAGCLIGAEHVNNSYECDIPIGAGICASYSVASQSIIAYTMSLGAENSVAYSNNSIAIPTNFTISVTTEILPVSMTKTSVDCTMYICGDSTECSNLLLQYGSFCTQLNRALTGIAVEQDKNTQEVFAQVKQIYKTPPIKDFGGFNFSQILPDPSKPSKRSFIEDLLFNKVTLADAGFIKQYGDCLGDIAARDLICAQKFNGLTVLPPLLTDEMIAQYTSALLAGTITSGWTFGAGAALQIPFAMQMAYRFNGIGVTQNVLYENQKLIANQFNSAIGKIQDSLSSTASALGKLQDVVNQNAQALNTLVKQLSSNFGAISSVLNDILSRLDPPEAEVQIDRLITGRLQSLQTYVTQQLIRAAEIRASANLAATKMSECVLGQSKRVDFCGKGYHLMSFPQSAPHGVVFLHVTYVPAQEKNFTTAPAICHDGKAHFPREGVFVSNGTHWFVTQRNFYEPQIITTDNTFVSGNCDVVIGIVNNTVYDPLQPELDSFKEELDKYFKNHTSPDVDLGDISGINASVVNIQKEIDRLNEVAKNLNESLIDLQELGKYEQYIKWPWYIWLGFIAGLIAIVMVTIMLCCMTSCCSCLKGCCSCGSCCKFDEDDSEPVLKGVALAYT

SEQ ID NO: 50 - protein, 11 aa, Artificial sequence
  S1/S2 furin cleavage site of the spike (S) polypeptide of nCoV
QTQTNSPRRAR

SEQ ID NO: 51 - DNA, 3744 bp, Artificial sequence
  Codon-optimized nucleotide sequence of the T4-S2P3F polypeptide of SARS-CoV-2
cgtacggccaccatgttcgtgtttctggtgctgctgccactggtgtccagtcagtgcgtgaacctgaccacacgaacacagctgccaccagcctacaccaatagcttcacccgcggagtgtactaccccgacaaggtgttccgcagcagcgtgctgcatagcacccaggatctgtttctgcccttcttcagcaacgtgacctggttccacgccatccacgtgtccggcaccaatggcaccaagcgcttcgataatcccgtgctgcccttcaacgatggcgtgtactttgccagcaccgagaagtccaatatcatccgcggctggatcttcggcaccacactggatagcaagacccagagcctgctgatcgtgaacaacgccaccaacgtggtcatcaaagtgtgcgagttccagttctgcaacgaccccttcctgggcgtctactaccacaagaacaacaagagctggatggaaagcgagttccgcgtgtacagcagcgccaacaactgcaccttcgagtacgtgtcccagccattcctgatggacctggaaggcaagcagggcaacttcaagaacctgcgcgagttcgtgttcaagaacatcgacggctacttcaaaatctacagcaagcacaccccaatcaacctcgtgcgcgatctgccacagggattcagtgctctggaacccctggtggatctgcccatcggcatcaacattacccgctttcagacactgctggccctgcaccgcagttacttgacaccaggcgatagcagcagtggatggacagctggtgccgccgcttactacgttggatatctgcagccacgcacctttctgctgaagtacaacgagaacggcaccatcaccgacgccgtggattgtgctctcgatcccctgagcgagacaaagtgcaccctgaagtccttcaccgtcgagaagggcatctaccagaccagcaatttccgcgtgcagcccaccgagagcatcgtgcgcttccccaatatcaccaatctgtgccccttcggcgaggtgttcaatgccacacgctttgcctccgtgtacgcctggaatcgcaagcgcattagcaactgcgtggccgactactccgtgctgtacaatagcgccagcttcagcaccttcaagtgctacggcgtgtcacccaccaagctgaacgacctgtgcttcaccaatgtgtacgccgacagcttcgtgatccgcggagatgaagtgcgacagattgccccaggccagaccggcaagatcgccgactacaattacaagctgcccgacgacttcaccggctgcgtgatcgcctggaacagcaacaacctggattccaaagtcggcggcaactacaactacctgtaccgcctgttccgcaagagcaatctgaagcccttcgagcgcgacatcagcaccgaaatctaccaggccggaagcaccccatgcaacggcgtggaaggcttcaactgctacttcccactgcagtcctacggatttcagcccacaaatggcgtgggctaccagccatatcgagtggtggtgctgagcttcgaactgctgcatgctccagctaccgtgtgcggccccaagaagagtaccaacctggtcaagaacaaatgcgtgaacttcaacttcaacggcctgaccggaaccggcgtgctgaccgagagtaacaagaagttcctgccattccagcagtttggccgcgacattgccgatacaaccgatgccgttcgcgatccccagaccttggagatcctggatattaccccatgctccttcggcggcgtgtccgtgattacaccaggcaccaataccagcaaccaggtggccgttctgtaccaggatgtgaattgcacagaggtgcccgtggccattcacgccgatcaattgacaccaacatggcgcgtgtactccaccggcagcaatgtgtttcaaacccgcgctggatgcctgattggagccgagcacgtgaacaatagctacgagtgcgatatccccatcggagccggaatctgcgcctcctatcagacccagaccaatagtccaggatccgccggaagtgtggccagccagagcatcattgcctataccatgagcctgggcgccgagaatagcgtggcctactccaacaacagcattgctatccccaccaacttcaccatcagcgtgaccaccgagatcctgccagtgtccatgaccaagaccagcgtggactgcaccatgtacatctgcggagatagcaccgagtgcagcaacctgctgctgcagtacggaagtttctgcacccagctgaatcgcgccctgacaggcattgccgtggaacaggataagaacacccaagaggtgttcgcccaagtgaagcaaatctacaagaccccaccaatcaaggatttcggcggcttcaatttcagccagattctgcccgatccaagcaagcccagcaagcgcagcttcatcgaggacctgctgttcaacaaagtgacactggccgacgccggattcatcaagcagtatggcgattgcctgggcgatattgccgcacgcgatctgatttgcgcccagaagtttaacggactgaccgtcctgccaccactgctgacagatgagatgatcgcccagtacacaagtgccctgctggccggaaccattaccagcggatggacatttggagccggtgccgctctgcagattcccttcgctatgcagatggcctaccgcttcaatggcattggcgtgacccagaatgtgctgtacgagaaccagaagctgatcgccaaccagttcaacagcgccatcggcaagattcaggacagcctgagtagtaccgccagcgctctgggaaagctgcaggatgtggtcaaccagaacgctcaggccctgaacaccctggttaagcagctgagcagcaacttcggcgccatcagtagcgtgctgaacgatatcctgagccgcctggatccaccagaagccgaggtgcagatcgatcgcctgattaccggacgcctgcagtccctgcagacctatgtgacacagcagctgatccgagccgccgagattcgagctagtgctaatctggccgccaccaagatgagcgaatgtgtgctgggacagagcaagcgcgtggacttttgcggcaagggataccacctgatgagcttcccacagagtgctccacacggcgtggtgtttctgcatgtgacctacgtgcccgctcaagagaagaatttcaccaccgctccagccatctgccacgacggaaaggcccattttccacgcgagggcgtgttcgttagcaacggcactcattggttcgtcacccagcgcaacttctacgagccccagatcatcaccaccgacaacaccttcgtcagcggcaactgcgacgtcgtgatcggcattgtgaacaacaccgtgtacgatccactgcagcccgagctggacagcttcaaagaggaactggacaagtactttaagaaccacacaagccccgacgtggacctgggagacattagcggaatcaacgccagcgtggtcaacatccagaaagagattgaccgcctgaacgaggtggccaagaatctgaacgagagcctgatcgacctgcaagaactgggcaaatacgagcagtacattaagtccggaggctacatccccgaggccccacgcgatggccaggcctacgtgcgcaaggacggcgagtgggtgctgctgtccaccttcctgtgataagcgcgc

SEQ ID NO: 52 - protein, 1240 aa, Artificial sequence
  T4-S2P3F polypeptide of SARS-CoV-2
MFVFLVLLPLVSSQCVNLTTRTQLPPAYTNSFTRGVYYPDKVFRSSVLHSTQDLFLPFFSNVTWFHAIHVSGTNGTKRFDNPVLPFNDGVYFASTEKSNIIRGWIFGTTLDSKTQSLLIVNNATNVVIKVCEFQFCNDPFLGVYYHKNNKSWMESEFRVYSSANNCTFEYVSQPFLMDLEGKQGNFKNLREFVFKNIDGYFKIYSKHTPINLVRDLPQGFSALEPLVDLPIGINITRFQTLLALHRSYLTPGDSSSGWTAGAAAYYVGYLQPRTFLLKYNENGTITDAVDCALDPLSETKCTLKSFTVEKGIYQTSNFRVQPTESIVRFPNITNLCPFGEVFNATRFASVYAWNRKRISNCVADYSVLYNSASFSTFKCYGVSPTKLNDLCFTNVYADSFVIRGDEVRQIAPGQTGKIADYNYKLPDDFTGCVIAWNSNNLDSKVGGNYNYLYRLFRKSNLKPFERDISTEIYQAGSTPCNGVEGFNCYFPLQSYGFQPTNGVGYQPYRVVVLSFELLHAPATVCGPKKSTNLVKNKCVNFNFNGLTGTGVLTESNKKFLPFQQFGRDIADTTDAVRDPQTLEILDITPCSFGGVSVITPGTNTSNQVAVLYQDVNCTEVPVAIHADQLTPTWRVYSTGSNVFQTRAGCLIGAEHVNNSYECDIPIGAGICASYQTQTNSPGSAGSVASQSIIAYTMSLGAENSVAYSNNSIAIPTNFTISVTTEILPVSMTKTSVDCTMYICGDSTECSNLLLQYGSFCTQLNRALTGIAVEQDKNTQEVFAQVKQIYKTPPIKDFGGFNFSQILPDPSKPSKRSFIEDLLFNKVTLADAGFIKQYGDCLGDIAARDLICAQKFNGLTVLPPLLTDEMIAQYTSALLAGTITSGWTFGAGAALQIPFAMQMAYRFNGIGVTQNVLYENQKLIANQFNSAIGKIQDSLSSTASALGKLQDVVNQNAQALNTLVKQLSSNFGAISSVLNDILSRLDPPEAEVQIDRLITGRLQSLQTYVTQQLIRAAEIRASANLAATKMSECVLGQSKRVDFCGKGYHLMSFPQSAPHGVVFLHVTYVPAQEKNFTTAPAICHDGKAHFPREGVFVSNGTHWFVTQRNFYEPQIITTDNTFVSGNCDVVIGIVNNTVYDPLQPELDSFKEELDKYFKNHTSPDVDLGDISGINASVVNIQKEIDRLNEVAKNLNESLIDLQELGKYEQYIKSGGYIPEAPRDGQAYVRKDGEWVLLSTFL

SEQ ID NO: 53 - DNA, 3870 bp, Artificial sequence
  Codon-optimized nucleotide sequence of the S6P polypeptide of SARS-CoV-2
gctagcagatctcgtacggccaccatgttcgtgtttctggtgctgctgccactggtgtccagtcagtgcgtgaacctgaccacacgaacacagctgccaccagcctacaccaatagcttcacccgcggagtgtactaccccgacaaggtgttccgcagcagcgtgctgcatagcacccaggatctgtttctgcccttcttcagcaacgtgacctggttccacgccatccacgtgtccggcaccaatggcaccaagcgcttcgataatcccgtgctgcccttcaacgatggcgtgtactttgccagcaccgagaagtccaatatcatccgcggctggatcttcggcaccacactggatagcaagacccagagcctgctgatcgtgaacaacgccaccaacgtggtcatcaaagtgtgcgagttccagttctgcaacgaccccttcctgggcgtctactaccacaagaacaacaagagctggatggaaagcgagttccgcgtgtacagcagcgccaacaactgcaccttcgagtacgtgtcccagccattcctgatggacctggaaggcaagcagggcaacttcaagaacctgcgcgagttcgtgttcaagaacatcgacggctacttcaaaatctacagcaagcacaccccaatcaacctcgtgcgcgatctgccacagggattcagtgctctggaacccctggtggatctgcccatcggcatcaacattacccgctttcagacactgctggccctgcaccgcagttacttgacaccaggcgatagcagcagtggatggacagctggtgccgccgcttactacgttggatatctgcagccacgcacctttctgctgaagtacaacgagaacggcaccatcaccgacgccgtggattgtgctctcgatcccctgagcgagacaaagtgcaccctgaagtccttcaccgtcgagaagggcatctaccagaccagcaatttccgcgtgcagcccaccgagagcatcgtgcgcttccccaatatcaccaatctgtgccccttcggcgaggtgttcaatgccacacgctttgcctccgtgtacgcctggaatcgcaagcgcattagcaactgcgtggccgactactccgtgctgtacaatagcgccagcttcagcaccttcaagtgctacggcgtgtcacccaccaagctgaacgacctgtgcttcaccaatgtgtacgccgacagcttcgtgatccgcggagatgaagtgcgacagattgccccaggccagaccggcaagatcgccgactacaattacaagctgcccgacgacttcaccggctgcgtgatcgcctggaacagcaacaacctggattccaaagtcggcggcaactacaactacctgtaccgcctgttccgcaagagcaatctgaagcccttcgagcgcgacatcagcaccgaaatctaccaggccggaagcaccccatgcaacggcgtggaaggcttcaactgctacttcccactgcagtcctacggatttcagcccacaaatggcgtgggctaccagccatatcgagtggtggtgctgagcttcgaactgctgcatgctccagctaccgtgtgcggccccaagaagagtaccaacctggtcaagaacaaatgcgtgaacttcaacttcaacggcctgaccggaaccggcgtgctgaccgagagtaacaagaagttcctgccattccagcagtttggccgcgacattgccgatacaaccgatgccgttcgcgatccccagaccttggagatcctggatattaccccatgctccttcggcggcgtgtccgtgattacaccaggcaccaataccagcaaccaggtggccgttctgtaccaggatgtgaattgcacagaggtgcccgtggccattcacgccgatcaattgacaccaacatggcgcgtgtactccaccggcagcaatgtgtttcaaacccgcgctggatgcctgattggagccgagcacgtgaacaatagctacgagtgcgatatccccatcggagccggaatctgcgcctcctatcagacccagaccaatagtccacgacgagcccgaagtgtggccagccagagcatcattgcctataccatgagcctgggcgccgagaatagcgtggcctactccaacaacagcattgctatccccaccaacttcaccatcagcgtgaccaccgagatcctgccagtgtccatgaccaagaccagcgtggactgcaccatgtacatctgcggagatagcaccgagtgcagcaacctgctgctgcagtacggaagtttctgcacccagctgaatcgcgccctgacaggcattgccgtggaacaggataagaacacccaagaggtgttcgcccaagtgaagcaaatctacaagaccccaccaatcaaggatttcggcggcttcaatttcagccagattctgcccgatccaagcaagcccagcaagcgcagcccaatcgaggacctgctgttcaacaaagtgacactggccgacgccggattcatcaagcagtatggcgattgcctgggcgatattgccgcacgcgatctgatttgcgcccagaagtttaacggactgaccgtcctgccaccactgctgacagatgagatgatcgcccagtacacaagtgccctgctggccggaaccattaccagcggatggacatttggagccggtccagctctgcagattcccttcccaatgcagatggcctaccgcttcaatggcattggcgtgacccagaatgtgctgtacgagaaccagaagctgatcgccaaccagttcaacagcgccatcggcaagattcaggacagcctgagtagtaccccaagcgctctgggaaagctgcaggatgtggtcaaccagaacgctcaggccctgaacaccctggttaagcagctgagcagcaacttcggcgccatcagtagcgtgctgaacgatatcctgagccgcctggatccaccagaagccgaggtgcagatcgatcgcctgattaccggacgcctgcagtccctgcagacctatgtgacacagcagctgatccgagccgccgagattcgagctagtgctaatctggccgccaccaagatgagcgaatgtgtgctgggacagagcaagcgcgtggacttttgcggcaagggataccacctgatgagcttcccacagagtgctccacacggcgtggtgtttctgcatgtgacctacgtgcccgctcaagagaagaatttcaccaccgctccagccatctgccacgacggaaaggcccattttccacgcgagggcgtgttcgttagcaacggcactcattggttcgtcacccagcgcaacttctacgagccccagatcatcaccaccgacaacaccttcgtcagcggcaactgcgacgtcgtgatcggcattgtgaacaacaccgtgtacgatccactgcagcccgagctggacagcttcaaagaggaactggacaagtactttaagaaccacacaagccccgacgtggacctgggagacattagcggaatcaacgccagcgtggtcaacatccagaaagagattgaccgcctgaacgaggtggccaagaatctgaacgagagcctgatcgacctgcaagaactgggcaaatacgagcagtacattaagtggccctggtacatctggctgggcttcattgccggactgattgccatcgtgatggtcaccattatgctgtgctgcatgaccagttgctgcagctgcctgaagggatgctgcagttgcggaagctgctgcaagttcgacgaggatgatagcgagccagtgctgaagggcgtcaagctgcactacacctgataacgagcgcgcctcgaggaattc

SEQ ID NO: 54 - protein, 1273 aa, Artificial sequence
  S6P polypeptide of SARS-CoV-2
MFVFLVLLPLVSSQCVNLTTRTQLPPAYTNSFTRGVYYPDKVFRSSVLHSTQDLFLPFFSNVTWFHAIHVSGTNGTKRFDNPVLPFNDGVYFASTEKSNIIRGWIFGTTLDSKTQSLLIVNNATNVVIKVCEFQFCNDPFLGVYYHKNNKSWMESEFRVYSSANNCTFEYVSQPFLMDLEGKQGNFKNLREFVFKNIDGYFKIYSKHTPINLVRDLPQGFSALEPLVDLPIGINITRFQTLLALHRSYLTPGDSSSGWTAGAAAYYVGYLQPRTFLLKYNENGTITDAVDCALDPLSETKCTLKSFTVEKGIYQTSNFRVQPTESIVRFPNITNLCPFGEVFNATRFASVYAWNRKRISNCVADYSVLYNSASFSTFKCYGVSPTKLNDLCFTNVYADSFVIRGDEVRQIAPGQTGKIADYNYKLPDDFTGCVIAWNSNNLDSKVGGNYNYLYRLFRKSNLKPFERDISTEIYQAGSTPCNGVEGFNCYFPLQSYGFQPTNGVGYQPYRVVVLSFELLHAPATVCGPKKSTNLVKNKCVNFNFNGLTGTGVLTESNKKFLPFQQFGRDIADTTDAVRDPQTLEILDITPCSFGGVSVITPGTNTSNQVAVLYQDVNCTEVPVAIHADQLTPTWRVYSTGSNVFQTRAGCLIGAEHVNNSYECDIPIGAGICASYQTQTNSPRRARSVASQSIIAYTMSLGAENSVAYSNNSIAIPTNFTISVTTEILPVSMTKTSVDCTMYICGDSTECSNLLLQYGSFCTQLNRALTGIAVEQDKNTQEVFAQVKQIYKTPPIKDFGGFNFSQILPDPSKPSKRSPIEDLLFNKVTLADAGFIKQYGDCLGDIAARDLICAQKFNGLTVLPPLLTDEMIAQYTSALLAGTITSGWTFGAGPALQIPFPMQMAYRFNGIGVTQNVLYENQKLIANQFNSAIGKIQDSLSSTPSALGKLQDVVNQNAQALNTLVKQLSSNFGAISSVLNDILSRLDPPEAEVQIDRLITGRLQSLQTYVTQQLIRAAEIRASANLAATKMSECVLGQSKRVDFCGKGYHLMSFPQSAPHGVVFLHVTYVPAQEKNFTTAPAICHDGKAHFPREGVFVSNGTHWFVTQRNFYEPQIITTDNTFVSGNCDVVIGIVNNTVYDPLQPELDSFKEELDKYFKNHTSPDVDLGDISGINASVVNIQKEIDRLNEVAKNLNESLIDLQELGKYEQYIKWPWYIWLGFIAGLIAIVMVTIMLCCMTSCCSCLKGCCSCGSCCKFDEDDSEPVLKGVKLHYT

SEQ ID NO: 55 - DNA, 3870 bp, Artificial sequence
  Codon-optimized nucleotide sequence of the S6P3F polypeptide of SARS-CoV-2
gctagcagatctcgtacggccaccatgttcgtgtttctggtgctgctgccactggtgtccagtcagtgcgtgaacctgaccacacgaacacagctgccaccagcctacaccaatagcttcacccgcggagtgtactaccccgacaaggtgttccgcagcagcgtgctgcatagcacccaggatctgtttctgcccttcttcagcaacgtgacctggttccacgccatccacgtgtccggcaccaatggcaccaagcgcttcgataatcccgtgctgcccttcaacgatggcgtgtactttgccagcaccgagaagtccaatatcatccgcggctggatcttcggcaccacactggatagcaagacccagagcctgctgatcgtgaacaacgccaccaacgtggtcatcaaagtgtgcgagttccagttctgcaacgaccccttcctgggcgtctactaccacaagaacaacaagagctggatggaaagcgagttccgcgtgtacagcagcgccaacaactgcaccttcgagtacgtgtcccagccattcctgatggacctggaaggcaagcagggcaacttcaagaacctgcgcgagttcgtgttcaagaacatcgacggctacttcaaaatctacagcaagcacaccccaatcaacctcgtgcgcgatctgccacagggattcagtgctctggaacccctggtggatctgcccatcggcatcaacattacccgctttcagacactgctggccctgcaccgcagttacttgacaccaggcgatagcagcagtggatggacagctggtgccgccgcttactacgttggatatctgcagccacgcacctttctgctgaagtacaacgagaacggcaccatcaccgacgccgtggattgtgctctcgatcccctgagcgagacaaagtgcaccctgaagtccttcaccgtcgagaagggcatctaccagaccagcaatttccgcgtgcagcccaccgagagcatcgtgcgcttccccaatatcaccaatctgtgccccttcggcgaggtgttcaatgccacacgctttgcctccgtgtacgcctggaatcgcaagcgcattagcaactgcgtggccgactactccgtgctgtacaatagcgccagcttcagcaccttcaagtgctacggcgtgtcacccaccaagctgaacgacctgtgcttcaccaatgtgtacgccgacagcttcgtgatccgcggagatgaagtgcgacagattgccccaggccagaccggcaagatcgccgactacaattacaagctgcccgacgacttcaccggctgcgtgatcgcctggaacagcaacaacctggattccaaagtcggcggcaactacaactacctgtaccgcctgttccgcaagagcaatctgaagcccttcgagcgcgacatcagcaccgaaatctaccaggccggaagcaccccatgcaacggcgtggaaggcttcaactgctacttcccactgcagtcctacggatttcagcccacaaatggcgtgggctaccagccatatcgagtggtggtgctgagcttcgaactgctgcatgctccagctaccgtgtgcggccccaagaagagtaccaacctggtcaagaacaaatgcgtgaacttcaacttcaacggcctgaccggaaccggcgtgctgaccgagagtaacaagaagttcctgccattccagcagtttggccgcgacattgccgatacaaccgatgccgttcgcgatccccagaccttggagatcctggatattaccccatgctccttcggcggcgtgtccgtgattacaccaggcaccaataccagcaaccaggtggccgttctgtaccaggatgtgaattgcacagaggtgcccgtggccattcacgccgatcaattgacaccaacatggcgcgtgtactccaccggcagcaatgtgtttcaaacccgcgctggatgcctgattggagccgagcacgtgaacaatagctacgagtgcgatatccccatcggagccggaatctgcgcctcctatcagacccagaccaatagtccaggatccgccggaagtgtggccagccagagcatcattgcctataccatgagcctgggcgccgagaatagcgtggcctactccaacaacagcattgctatccccaccaacttcaccatcagcgtgaccaccgagatcctgccagtgtccatgaccaagaccagcgtggactgcaccatgtacatctgcggagatagcaccgagtgcagcaacctgctgctgcagtacggaagtttctgcacccagctgaatcgcgccctgacaggcattgccgtggaacaggataagaacacccaagaggtgttcgcccaagtgaagcaaatctacaagaccccaccaatcaaggatttcggcggcttcaatttcagccagattctgcccgatccaagcaagcccagcaagcgcagcccaatcgaggacctgctgttcaacaaagtgacactggccgacgccggattcatcaagcagtatggcgattgcctgggcgatattgccgcacgcgatctgatttgcgcccagaagtttaacggactgaccgtcctgccaccactgctgacagatgagatgatcgcccagtacacaagtgccctgctggccggaaccattaccagcggatggacatttggagccggtccagctctgcagattcccttcccaatgcagatggcctaccgcttcaatggcattggcgtgacccagaatgtgctgtacgagaaccagaagctgatcgccaaccagttcaacagcgccatcggcaagattcaggacagcctgagtagtaccccaagcgctctgggaaagctgcaggatgtggtcaaccagaacgctcaggccctgaacaccctggttaagcagctgagcagcaacttcggcgccatcagtagcgtgctgaacgatatcctgagccgcctggatccaccagaagccgaggtgcagatcgatcgcctgattaccggacgcctgcagtccctgcagacctatgtgacacagcagctgatccgagccgccgagattcgagctagtgctaatctggccgccaccaagatgagcgaatgtgtgctgggacagagcaagcgcgtggacttttgcggcaagggataccacctgatgagcttcccacagagtgctccacacggcgtggtgtttctgcatgtgacctacgtgcccgctcaagagaagaatttcaccaccgctccagccatctgccacgacggaaaggcccattttccacgcgagggcgtgttcgttagcaacggcactcattggttcgtcacccagcgcaacttctacgagccccagatcatcaccaccgacaacaccttcgtcagcggcaactgcgacgtcgtgatcggcattgtgaacaacaccgtgtacgatccactgcagcccgagctggacagcttcaaagaggaactggacaagtactttaagaaccacacaagccccgacgtggacctgggagacattagcggaatcaacgccagcgtggtcaacatccagaaagagattgaccgcctgaacgaggtggccaagaatctgaacgagagcctgatcgacctgcaagaactgggcaaatacgagcagtacattaagtggccctggtacatctggctgggcttcattgccggactgattgccatcgtgatggtcaccattatgctgtgctgcatgaccagttgctgcagctgcctgaagggatgctgcagttgcggaagctgctgcaagttcgacgaggatgatagcgagccagtgctgaagggcgtcaagctgcactacacctgataacgagcgcgcctcgaggaattc

SEQ ID NO: 56 - protein, 1273 aa, Artificial sequence
  S6P3F polypeptide of SARS-CoV-2
MFVFLVLLPLVSSQCVNLTTRTQLPPAYTNSFTRGVYYPDKVFRSSVLHSTQDLFLPFFSNVTWFHAIHVSGTNGTKRFDNPVLPFNDGVYFASTEKSNIIRGWIFGTTLDSKTQSLLIVNNATNVVIKVCEFQFCNDPFLGVYYHKNNKSWMESEFRVYSSANNCTFEYVSQPFLMDLEGKQGNFKNLREFVFKNIDGYFKIYSKHTPINLVRDLPQGFSALEPLVDLPIGINITRFQTLLALHRSYLTPGDSSSGWTAGAAAYYVGYLQPRTFLLKYNENGTITDAVDCALDPLSETKCTLKSFTVEKGIYQTSNFRVQPTESIVRFPNITNLCPFGEVFNATRFASVYAWNRKRISNCVADYSVLYNSASFSTFKCYGVSPTKLNDLCFTNVYADSFVIRGDEVRQIAPGQTGKIADYNYKLPDDFTGCVIAWNSNNLDSKVGGNYNYLYRLFRKSNLKPFERDISTEIYQAGSTPCNGVEGFNCYFPLQSYGFQPTNGVGYQPYRVVVLSFELLHAPATVCGPKKSTNLVKNKCVNFNFNGLTGTGVLTESNKKFLPFQQFGRDIADTTDAVRDPQTLEILDITPCSFGGVSVITPGTNTSNQVAVLYQDVNCTEVPVAIHADQLTPTWRVYSTGSNVFQTRAGCLIGAEHVNNSYECDIPIGAGICASYQTQTNSPGSAGSVASQSIIAYTMSLGAENSVAYSNNSIAIPTNFTISVTTEILPVSMTKTSVDCTMYICGDSTECSNLLLQYGSFCTQLNRALTGIAVEQDKNTQEVFAQVKQIYKTPPIKDFGGFNFSQILPDPSKPSKRSPIEDLLFNKVTLADAGFIKQYGDCLGDIAARDLICAQKFNGLTVLPPLLTDEMIAQYTSALLAGTITSGWTFGAGPALQIPFPMQMAYRFNGIGVTQNVLYENQKLIANQFNSAIGKIQDSLSSTPSALGKLQDVVNQNAQALNTLVKQLSSNFGAISSVLNDILSRLDPPEAEVQIDRLITGRLQSLQTYVTQQLIRAAEIRASANLAATKMSECVLGQSKRVDFCGKGYHLMSFPQSAPHGVVFLHVTYVPAQEKNFTTAPAICHDGKAHFPREGVFVSNGTHWFVTQRNFYEPQIITTDNTFVSGNCDVVIGIVNNTVYDPLQPELDSFKEELDKYFKNHTSPDVDLGDISGINASVVNIQKEIDRLNEVAKNLNESLIDLQELGKYEQYIKWPWYIWLGFIAGLIAIVMVTIMLCCMTSCCSCLKGCCSCGSCCKFDEDDSEPVLKGVKLHYT

SEQ ID NO: 57 - DNA, 3834 bp, Artificial sequence
  Codon-optimized nucleotide sequence of the S6PdeltaF polypeptide of SARS-CoV-2
gctagcagatctcgtacggccaccatgttcgtgtttctggtgctgctgccactggtgtccagtcagtgcgtgaacctgaccacacgaacacagctgccaccagcctacaccaatagcttcacccgcggagtgtactaccccgacaaggtgttccgcagcagcgtgctgcatagcacccaggatctgtttctgcccttcttcagcaacgtgacctggttccacgccatccacgtgtccggcaccaatggcaccaagcgcttcgataatcccgtgctgcccttcaacgatggcgtgtactttgccagcaccgagaagtccaatatcatccgcggctggatcttcggcaccacactggatagcaagacccagagcctgctgatcgtgaacaacgccaccaacgtggtcatcaaagtgtgcgagttccagttctgcaacgaccccttcctgggcgtctactaccacaagaacaacaagagctggatggaaagcgagttccgcgtgtacagcagcgccaacaactgcaccttcgagtacgtgtcccagccattcctgatggacctggaaggcaagcagggcaacttcaagaacctgcgcgagttcgtgttcaagaacatcgacggctacttcaaaatctacagcaagcacaccccaatcaacctcgtgcgcgatctgccacagggattcagtgctctggaacccctggtggatctgcccatcggcatcaacattacccgctttcagacactgctggccctgcaccgcagttacttgacaccaggcgatagcagcagtggatggacagctggtgccgccgcttactacgttggatatctgcagccacgcacctttctgctgaagtacaacgagaacggcaccatcaccgacgccgtggattgtgctctcgatcccctgagcgagacaaagtgcaccctgaagtccttcaccgtcgagaagggcatctaccagaccagcaatttccgcgtgcagcccaccgagagcatcgtgcgcttccccaatatcaccaatctgtgccccttcggcgaggtgttcaatgccacacgctttgcctccgtgtacgcctggaatcgcaagcgcattagcaactgcgtggccgactactccgtgctgtacaatagcgccagcttcagcaccttcaagtgctacggcgtgtcacccaccaagctgaacgacctgtgcttcaccaatgtgtacgccgacagcttcgtgatccgcggagatgaagtgcgacagattgccccaggccagaccggcaagatcgccgactacaattacaagctgcccgacgacttcaccggctgcgtgatcgcctggaacagcaacaacctggattccaaagtcggcggcaactacaactacctgtaccgcctgttccgcaagagcaatctgaagcccttcgagcgcgacatcagcaccgaaatctaccaggccggaagcaccccatgcaacggcgtggaaggcttcaactgctacttcccactgcagtcctacggatttcagcccacaaatggcgtgggctaccagccatatcgagtggtggtgctgagcttcgaactgctgcatgctccagctaccgtgtgcggccccaagaagagtaccaacctggtcaagaacaaatgcgtgaacttcaacttcaacggcctgaccggaaccggcgtgctgaccgagagtaacaagaagttcctgccattccagcagtttggccgcgacattgccgatacaaccgatgccgttcgcgatccccagaccttggagatcctggatattaccccatgctccttcggcggcgtgtccgtgattacaccaggcaccaataccagcaaccaggtggccgttctgtaccaggatgtgaattgcacagaggtgcccgtggccattcacgccgatcaattgacaccaacatggcgcgtgtactccaccggcagcaatgtgtttcaaacccgcgctggatgcctgattggagccgagcacgtgaacaatagctacgagtgcgatatccccatcggagccggaatctgcgcatcctatagtgtggccagccagagcatcattgcctataccatgagcctgggcgccgagaatagcgtggcctactccaacaacagcattgctatccccaccaacttcaccatcagcgtgaccaccgagatcctgccagtgtccatgaccaagaccagcgtggactgcaccatgtacatctgcggagatagcaccgagtgcagcaacctgctgctgcagtacggaagtttctgcacccagctgaatcgcgccctgacaggcattgccgtggaacaggataagaacacccaagaggtgttcgcccaagtgaagcaaatctacaagaccccaccaatcaaggatttcggcggcttcaatttcagccagattctgcccgatccaagcaagcccagcaagcgcagcccaatcgaggacctgctgttcaacaaagtgacactggccgacgccggattcatcaagcagtatggcgattgcctgggcgatattgccgcacgcgatctgatttgcgcccagaagtttaacggactgaccgtcctgccaccactgctgacagatgagatgatcgcccagtacacaagtgccctgctggccggaaccattaccagcggatggacatttggagccggtccagctctgcagattcccttcccaatgcagatggcctaccgcttcaatggcattggcgtgacccagaatgtgctgtacgagaaccagaagctgatcgccaaccagttcaacagcgccatcggcaagattcaggacagcctgagtagtaccccaagcgctctgggaaagctgcaggatgtggtcaaccagaacgctcaggccctgaacaccctggttaagcagctgagcagcaacttcggcgccatcagtagcgtgctgaacgatatcctgagccgcctggatccaccagaagccgaggtgcagatcgatcgcctgattaccggacgcctgcagtccctgcagacctatgtgacacagcagctgatccgagccgccgagattcgagctagtgctaatctggccgccaccaagatgagcgaatgtgtgctgggacagagcaagcgcgtggacttttgcggcaagggataccacctgatgagcttcccacagagtgctccacacggcgtggtgtttctgcatgtgacctacgtgcccgctcaagagaagaatttcaccaccgctccagccatctgccacgacggaaaggcccattttccacgcgagggcgtgttcgttagcaacggcactcattggttcgtcacccagcgcaacttctacgagccccagatcatcaccaccgacaacaccttcgtcagcggcaactgcgacgtcgtgatcggcattgtgaacaacaccgtgtacgatccactgcagcccgagctggacagcttcaaagaggaactggacaagtactttaagaaccacacaagccccgacgtggacctgggagacattagcggaatcaacgccagcgtggtcaacatccagaaagagattgaccgcctgaacgaggtggccaagaatctgaacgagagcctgatcgacctgcaagaactgggcaaatacgagcagtacattaagtggccctggtacatctggctgggcttcattgccggactgattgccatcgtgatggtcaccattatgctgtgctgcatgaccagttgctgcagctgcctgaagggatgctgcagttgcggaagctgctgcaagttcgacgaggatgatagcgagccagtgctgaagggcgtcaagctgcactacacctgataagcgcgcctcgaggaattc

SEQ ID NO: 58 - protein, 1262 aa, Artificial sequence
  S6PdeltaF polypeptide of SARS-CoV-2
MFVFLVLLPLVSSQCVNLTTRTQLPPAYTNSFTRGVYYPDKVFRSSVLHSTQDLFLPFFSNVTWFHAIHVSGTNGTKRFDNPVLPFNDGVYFASTEKSNIIRGWIFGTTLDSKTQSLLIVNNATNVVIKVCEFQFCNDPFLGVYYHKNNKSWMESEFRVYSSANNCTFEYVSQPFLMDLEGKQGNFKNLREFVFKNIDGYFKIYSKHTPINLVRDLPQGFSALEPLVDLPIGINITRFQTLLALHRSYLTPGDSSSGWTAGAAAYYVGYLQPRTFLLKYNENGTITDAVDCALDPLSETKCTLKSFTVEKGIYQTSNFRVQPTESIVRFPNITNLCPFGEVFNATRFASVYAWNRKRISNCVADYSVLYNSASFSTFKCYGVSPTKLNDLCFTNVYADSFVIRGDEVRQIAPGQTGKIADYNYKLPDDFTGCVIAWNSNNLDSKVGGNYNYLYRLFRKSNLKPFERDISTEIYQAGSTPCNGVEGFNCYFPLQSYGFQPTNGVGYQPYRVVVLSFELLHAPATVCGPKKSTNLVKNKCVNFNFNGLTGTGVLTESNKKFLPFQQFGRDIADTTDAVRDPQTLEILDITPCSFGGVSVITPGTNTSNQVAVLYQDVNCTEVPVAIHADQLTPTWRVYSTGSNVFQTRAGCLIGAEHVNNSYECDIPIGAGICASYSVASQSIIAYTMSLGAENSVAYSNNSIAIPTNFTISVTTEILPVSMTKTSVDCTMYICGDSTECSNLLLQYGSFCTQLNRALTGIAVEQDKNTQEVFAQVKQIYKTPPIKDFGGFNFSQILPDPSKPSKRSPIEDLLFNKVTLADAGFIKQYGDCLGDIAARDLICAQKFNGLTVLPPLLTDEMIAQYTSALLAGTITSGWTFGAGPALQIPFPMQMAYRFNGIGVTQNVLYENQKLIANQFNSAIGKIQDSLSSTPSALGKLQDVVNQNAQALNTLVKQLSSNFGAISSVLNDILSRLDPPEAEVQIDRLITGRLQSLQTYVTQQLIRAAEIRASANLAATKMSECVLGQSKRVDFCGKGYHLMSFPQSAPHGVVFLHVTYVPAQEKNFTTAPAICHDGKAHFPREGVFVSNGTHWFVTQRNFYEPQIITTDNTFVSGNCDVVIGIVNNTVYDPLQPELDSFKEELDKYFKNHTSPDVDLGDISGINASVVNIQKEIDRLNEVAKNLNESLIDLQELGKYEQYIKWPWYIWLGFIAGLIAIVMVTIMLCCMTSCCSCLKGCCSCGSCCKFDEDDSEPVLKGVKLHYT

SEQ ID NO: 59 - DNA, 3870 bp, Artificial sequence
  Codon-optimized nucleotide sequence of the SCCPP polypeptide of SARS-CoV-2
gctagcagatctcgtacggccaccatgttcgtgtttctggtgctgctgccactggtgtccagtcagtgcgtgaacctgaccacacgaacacagctgccaccagcctacaccaatagcttcacccgcggagtgtactaccccgacaaggtgttccgcagcagcgtgctgcatagcacccaggatctgtttctgcccttcttcagcaacgtgacctggttccacgccatccacgtgtccggcaccaatggcaccaagcgcttcgataatcccgtgctgcccttcaacgatggcgtgtactttgccagcaccgagaagtccaatatcatccgcggctggatcttcggcaccacactggatagcaagacccagagcctgctgatcgtgaacaacgccaccaacgtggtcatcaaagtgtgcgagttccagttctgcaacgaccccttcctgggcgtctactaccacaagaacaacaagagctggatggaaagcgagttccgcgtgtacagcagcgccaacaactgcaccttcgagtacgtgtcccagccattcctgatggacctggaaggcaagcagggcaacttcaagaacctgcgcgagttcgtgttcaagaacatcgacggctacttcaaaatctacagcaagcacaccccaatcaacctcgtgcgcgatctgccacagggattcagtgctctggaacccctggtggatctgcccatcggcatcaacattacccgctttcagacactgctggccctgcaccgcagttacttgacaccaggcgatagcagcagtggatggacagctggtgccgccgcttactacgttggatatctgcagccacgcacctttctgctgaagtacaacgagaacggcaccatcaccgacgccgtggattgtgctctcgatcccctgagcgagacaaagtgcaccctgaagtccttcaccgtcgagaagggcatctaccagaccagcaatttccgcgtgcagcccaccgagagcatcgtgcgcttccccaatatcaccaatctgtgccccttcggcgaggtgttcaatgccacacgctttgcctccgtgtacgcctggaatcgcaagcgcattagcaactgcgtggccgactactccgtgctgtacaatagcgccagcttcagcaccttcaagtgctacggcgtgtgtcccaccaagctgaacgacctgtgcttcaccaatgtgtacgccgacagcttcgtgatccgcggagatgaagtgcgacagattgccccaggccagaccggcaagatcgccgactacaattacaagctgcccgacgacttcaccggctgcgtgatcgcctggaacagcaacaacctggattccaaagtcggcggcaactacaactacctgtaccgcctgttccgcaagagcaatctgaagcccttcgagcgcgacatcagcaccgaaatctaccaggccggaagcaccccatgcaacggcgtggaaggcttcaactgctacttcccactgcagtcctacggatttcagcccacaaatggcgtgggctaccagccatatcgagtggtggtgctgagcttcgaactgctgcatgctccagctaccgtgtgcggccccaagaagagtaccaacctggtcaagaacaaatgcgtgaacttcaacttcaacggcctgaccggaaccggcgtgctgaccgagagtaacaagaagttcctgccattccagcagtttggccgcgacattgccgatacaaccgatgccgttcgcgatccccagaccttggagatcctggatattaccccatgctccttcggcggcgtgtccgtgattacaccaggcaccaataccagcaaccaggtggccgttctgtaccaggatgtgaattgcacagaggtgcccgtggccattcacgccgatcaattgacaccaacatggcgcgtgtactccaccggcagcaatgtgtttcaaacccgcgctggatgcctgattggagccgagcacgtgaacaatagctacgagtgcgatatccccatcggagccggaatctgcgcctcctatcagacccagaccaatagtccacgacgagcccgaagtgtggccagccagagcatcattgcctataccatgagcctgggcgccgagaatagcgtggcctactccaacaacagcattgctatccccaccaacttcaccatcagcgtgaccaccgagatcctgccagtgtccatgaccaagaccagcgtggactgcaccatgtacatctgcggagatagcaccgagtgcagcaacctgctgctgcagtacggaagtttctgcacccagctgaatcgcgccctgacaggcattgccgtggaacaggataagaacacccaagaggtgttcgcccaagtgaagcaaatctacaagaccccaccaatcaaggatttcggcggcttcaatttcagccagattctgcccgatccaagcaagcccagcaagcgcagcttcatcgaggacctgctgttcaacaaagtgacactggccgacgccggattcatcaagcagtatggcgattgcctgggcgatattgccgcacgcgatctgatttgcgcccagaagtttaacggactgaccgtcctgccaccactgctgacagatgagatgatcgcccagtacacaagtgccctgctggccggaaccattaccagcggatggacatttggagccggtgccgctctgcagattcccttcgctatgcagatggcctaccgcttcaatggcattggcgtgacccagaatgtgctgtacgagaaccagaagctgatcgccaaccagttcaacagcgccatcggcaagattcaggacagcctgagtagtaccgccagcgctctgggaaagctgcaggatgtggtcaaccagaacgctcaggccctgaacaccctggttaagcagctgagcagcaacttcggcgccatcagtagcgtgctgaacgatatcctgagccgcctgtgtccaccagaagccgaggtgcagatcgatcgcctgattaccggacgcctgcagtccctgcagacctatgtgacacagcagctgatccgagccgccgagattcgagctagtgctaatctggccgccaccaagatgagcgaatgtgtgctgggacagagcaagcgcgtggacttttgcggcaagggataccacctgatgagcttcccacagagtgctccacacggcgtggtgtttctgcatgtgacctacgtgcccgctcaagagaagaatttcaccaccgctccagccatctgccacgacggaaaggcccattttccacgcgagggcgtgttcgttagcaacggcactcattggttcgtcacccagcgcaacttctacgagccccagatcatcaccaccgacaacaccttcgtcagcggcaactgcgacgtcgtgatcggcattgtgaacaacaccgtgtacgatccactgcagcccgagctggacagcttcaaagaggaactggacaagtactttaagaaccacacaagccccgacgtggacctgggagacattagcggaatcaacgccagcgtggtcaacatccagaaagagattgaccgcctgaacgaggtggccaagaatctgaacgagagcctgatcgacctgcaagaactgggcaaatacgagcagtacattaagtggccctggtacatctggctgggcttcattgccggactgattgccatcgtgatggtcaccattatgctgtgctgcatgaccagttgctgcagctgcctgaagggatgctgcagttgcggaagctgctgcaagttcgacgaggatgatagcgagccagtgctgaagggcgtcaagctgcactacacctgataacgagcgcgcctcgaggaattc

SEQ ID NO: 60 - protein, 1273 aa, Artificial sequence
  SCCPP polypeptide of SARS-CoV-2
MFVFLVLLPLVSSQCVNLTTRTQLPPAYTNSFTRGVYYPDKVFRSSVLHSTQDLFLPFFSNVTWFHAIHVSGTNGTKRFDNPVLPFNDGVYFASTEKSNIIRGWIFGTTLDSKTQSLLIVNNATNVVIKVCEFQFCNDPFLGVYYHKNNKSWMESEFRVYSSANNCTFEYVSQPFLMDLEGKQGNFKNLREFVFKNIDGYFKIYSKHTPINLVRDLPQGFSALEPLVDLPIGINITRFQTLLALHRSYLTPGDSSSGWTAGAAAYYVGYLQPRTFLLKYNENGTITDAVDCALDPLSETKCTLKSFTVEKGIYQTSNFRVQPTESIVRFPNITNLCPFGEVFNATRFASVYAWNRKRISNCVADYSVLYNSASFSTFKCYGVCPTKLNDLCFTNVYADSFVIRGDEVRQIAPGQTGKIADYNYKLPDDFTGCVIAWNSNNLDSKVGGNYNYLYRLFRKSNLKPFERDISTEIYQAGSTPCNGVEGFNCYFPLQSYGFQPTNGVGYQPYRVVVLSFELLHAPATVCGPKKSTNLVKNKCVNFNFNGLTGTGVLTESNKKFLPFQQFGRDIADTTDAVRDPQTLEILDITPCSFGGVSVITPGTNTSNQVAVLYQDVNCTEVPVAIHADQLTPTWRVYSTGSNVFQTRAGCLIGAEHVNNSYECDIPIGAGICASYQTQTNSPRRARSVASQSIIAYTMSLGAENSVAYSNNSIAIPTNFTISVTTEILPVSMTKTSVDCTMYICGDSTECSNLLLQYGSFCTQLNRALTGIAVEQDKNTQEVFAQVKQIYKTPPIKDFGGFNFSQILPDPSKPSKRSFIEDLLFNKVTLADAGFIKQYGDCLGDIAARDLICAQKFNGLTVLPPLLTDEMIAQYTSALLAGTITSGWTFGAGAALQIPFAMQMAYRFNGIGVTQNVLYENQKLIANQFNSAIGKIQDSLSSTASALGKLQDVVNQNAQALNTLVKQLSSNFGAISSVLNDILSRLCPPEAEVQIDRLITGRLQSLQTYVTQQLIRAAEIRASANLAATKMSECVLGQSKRVDFCGKGYHLMSFPQSAPHGVVFLHVTYVPAQEKNFTTAPAICHDGKAHFPREGVFVSNGTHWFVTQRNFYEPQIITTDNTFVSGNCDVVIGIVNNTVYDPLQPELDSFKEELDKYFKNHTSPDVDLGDISGINASVVNIQKEIDRLNEVAKNLNESLIDLQELGKYEQYIKWPWYIWLGFIAGLIAIVMVTIMLCCMTSCCSCLKGCCSCGSCCKFDEDDSEPVLKGVKLHYT

SEQ ID NO: 61 - DNA, 3870 bp, Artificial sequence
  Codon-optimized nucleotide sequence of the SCC6P polypeptide of SARS-CoV-2
gctagcagatctcgtacggccaccatgttcgtgtttctggtgctgctgccactggtgtccagtcagtgcgtgaacctgaccacacgaacacagctgccaccagcctacaccaatagcttcacccgcggagtgtactaccccgacaaggtgttccgcagcagcgtgctgcatagcacccaggatctgtttctgcccttcttcagcaacgtgacctggttccacgccatccacgtgtccggcaccaatggcaccaagcgcttcgataatcccgtgctgcccttcaacgatggcgtgtactttgccagcaccgagaagtccaatatcatccgcggctggatcttcggcaccacactggatagcaagacccagagcctgctgatcgtgaacaacgccaccaacgtggtcatcaaagtgtgcgagttccagttctgcaacgaccccttcctgggcgtctactaccacaagaacaacaagagctggatggaaagcgagttccgcgtgtacagcagcgccaacaactgcaccttcgagtacgtgtcccagccattcctgatggacctggaaggcaagcagggcaacttcaagaacctgcgcgagttcgtgttcaagaacatcgacggctacttcaaaatctacagcaagcacaccccaatcaacctcgtgcgcgatctgccacagggattcagtgctctggaacccctggtggatctgcccatcggcatcaacattacccgctttcagacactgctggccctgcaccgcagttacttgacaccaggcgatagcagcagtggatggacagctggtgccgccgcttactacgttggatatctgcagccacgcacctttctgctgaagtacaacgagaacggcaccatcaccgacgccgtggattgtgctctcgatcccctgagcgagacaaagtgcaccctgaagtccttcaccgtcgagaagggcatctaccagaccagcaatttccgcgtgcagcccaccgagagcatcgtgcgcttccccaatatcaccaatctgtgccccttcggcgaggtgttcaatgccacacgctttgcctccgtgtacgcctggaatcgcaagcgcattagcaactgcgtggccgactactccgtgctgtacaatagcgccagcttcagcaccttcaagtgctacggcgtgtgtcccaccaagctgaacgacctgtgcttcaccaatgtgtacgccgacagcttcgtgatccgcggagatgaagtgcgacagattgccccaggccagaccggcaagatcgccgactacaattacaagctgcccgacgacttcaccggctgcgtgatcgcctggaacagcaacaacctggattccaaagtcggcggcaactacaactacctgtaccgcctgttccgcaagagcaatctgaagcccttcgagcgcgacatcagcaccgaaatctaccaggccggaagcaccccatgcaacggcgtggaaggcttcaactgctacttcccactgcagtcctacggatttcagcccacaaatggcgtgggctaccagccatatcgagtggtggtgctgagcttcgaactgctgcatgctccagctaccgtgtgcggccccaagaagagtaccaacctggtcaagaacaaatgcgtgaacttcaacttcaacggcctgaccggaaccggcgtgctgaccgagagtaacaagaagttcctgccattccagcagtttggccgcgacattgccgatacaaccgatgccgttcgcgatccccagaccttggagatcctggatattaccccatgctccttcggcggcgtgtccgtgattacaccaggcaccaataccagcaaccaggtggccgttctgtaccaggatgtgaattgcacagaggtgcccgtggccattcacgccgatcaattgacaccaacatggcgcgtgtactccaccggcagcaatgtgtttcaaacccgcgctggatgcctgattggagccgagcacgtgaacaatagctacgagtgcgatatccccatcggagccggaatctgcgcctcctatcagacccagaccaatagtccacgacgagcccgaagtgtggccagccagagcatcattgcctataccatgagcctgggcgccgagaatagcgtggcctactccaacaacagcattgctatccccaccaacttcaccatcagcgtgaccaccgagatcctgccagtgtccatgaccaagaccagcgtggactgcaccatgtacatctgcggagatagcaccgagtgcagcaacctgctgctgcagtacggaagtttctgcacccagctgaatcgcgccctgacaggcattgccgtggaacaggataagaacacccaagaggtgttcgcccaagtgaagcaaatctacaagaccccaccaatcaaggatttcggcggcttcaatttcagccagattctgcccgatccaagcaagcccagcaagcgcagcccaatcgaggacctgctgttcaacaaagtgacactggccgacgccggattcatcaagcagtatggcgattgcctgggcgatattgccgcacgcgatctgatttgcgcccagaagtttaacggactgaccgtcctgccaccactgctgacagatgagatgatcgcccagtacacaagtgccctgctggccggaaccattaccagcggatggacatttggagccggtccagctctgcagattcccttcccaatgcagatggcctaccgcttcaatggcattggcgtgacccagaatgtgctgtacgagaaccagaagctgatcgccaaccagttcaacagcgccatcggcaagattcaggacagcctgagtagtaccccaagcgctctgggaaagctgcaggatgtggtcaaccagaacgctcaggccctgaacaccctggttaagcagctgagcagcaacttcggcgccatcagtagcgtgctgaacgatatcctgagccgcctgtgtccaccagaagccgaggtgcagatcgatcgcctgattaccggacgcctgcagtccctgcagacctatgtgacacagcagctgatccgagccgccgagattcgagctagtgctaatctggccgccaccaagatgagcgaatgtgtgctgggacagagcaagcgcgtggacttttgcggcaagggataccacctgatgagcttcccacagagtgctccacacggcgtggtgtttctgcatgtgacctacgtgcccgctcaagagaagaatttcaccaccgctccagccatctgccacgacggaaaggcccattttccacgcgagggcgtgttcgttagcaacggcactcattggttcgtcacccagcgcaacttctacgagccccagatcatcaccaccgacaacaccttcgtcagcggcaactgcgacgtcgtgatcggcattgtgaacaacaccgtgtacgatccactgcagcccgagctggacagcttcaaagaggaactggacaagtactttaagaaccacacaagccccgacgtggacctgggagacattagcggaatcaacgccagcgtggtcaacatccagaaagagattgaccgcctgaacgaggtggccaagaatctgaacgagagcctgatcgacctgcaagaactgggcaaatacgagcagtacattaagtggccctggtacatctggctgggcttcattgccggactgattgccatcgtgatggtcaccattatgctgtgctgcatgaccagttgctgcagctgcctgaagggatgctgcagttgcggaagctgctgcaagttcgacgaggatgatagcgagccagtgctgaagggcgtcaagctgcactacacctgataacgagcgcgcctcgaggaattc

SEQ ID NO: 62 - protein, 1273 aa, Artificial sequence
  SCC6P polypeptide of SARS-CoV-2
MFVFLVLLPLVSSQCVNLTTRTQLPPAYTNSFTRGVYYPDKVFRSSVLHSTQDLFLPFFSNVTWFHAIHVSGTNGTKRFDNPVLPFNDGVYFASTEKSNIIRGWIFGTTLDSKTQSLLIVNNATNVVIKVCEFQFCNDPFLGVYYHKNNKSWMESEFRVYSSANNCTFEYVSQPFLMDLEGKQGNFKNLREFVFKNIDGYFKIYSKHTPINLVRDLPQGFSALEPLVDLPIGINITRFQTLLALHRSYLTPGDSSSGWTAGAAAYYVGYLQPRTFLLKYNENGTITDAVDCALDPLSETKCTLKSFTVEKGIYQTSNFRVQPTESIVRFPNITNLCPFGEVFNATRFASVYAWNRKRISNCVADYSVLYNSASFSTFKCYGVCPTKLNDLCFTNVYADSFVIRGDEVRQIAPGQTGKIADYNYKLPDDFTGCVIAWNSNNLDSKVGGNYNYLYRLFRKSNLKPFERDISTEIYQAGSTPCNGVEGFNCYFPLQSYGFQPTNGVGYQPYRVVVLSFELLHAPATVCGPKKSTNLVKNKCVNFNFNGLTGTGVLTESNKKFLPFQQFGRDIADTTDAVRDPQTLEILDITPCSFGGVSVITPGTNTSNQVAVLYQDVNCTEVPVAIHADQLTPTWRVYSTGSNVFQTRAGCLIGAEHVNNSYECDIPIGAGICASYQTQTNSPRRARSVASQSIIAYTMSLGAENSVAYSNNSIAIPTNFTISVTTEILPVSMTKTSVDCTMYICGDSTECSNLLLQYGSFCTQLNRALTGIAVEQDKNTQEVFAQVKQIYKTPPIKDFGGFNFSQILPDPSKPSKRSPIEDLLFNKVTLADAGFIKQYGDCLGDIAARDLICAQKFNGLTVLPPLLTDEMIAQYTSALLAGTITSGWTFGAGPALQIPFPMQMAYRFNGIGVTQNVLYENQKLIANQFNSAIGKIQDSLSSTPSALGKLQDVVNQNAQALNTLVKQLSSNFGAISSVLNDILSRLCPPEAEVQIDRLITGRLQSLQTYVTQQLIRAAEIRASANLAATKMSECVLGQSKRVDFCGKGYHLMSFPQSAPHGVVFLHVTYVPAQEKNFTTAPAICHDGKAHFPREGVFVSNGTHWFVTQRNFYEPQIITTDNTFVSGNCDVVIGIVNNTVYDPLQPELDSFKEELDKYFKNHTSPDVDLGDISGINASVVNIQKEIDRLNEVAKNLNESLIDLQELGKYEQYIKWPWYIWLGFIAGLIAIVMVTIMLCCMTSCCSCLKGCCSCGSCCKFDEDDSEPVLKGVKLHYT

SEQ ID NO: 63 - DNA, 3870 bp, Artificial sequence
  MV-optimized nucleotide sequence of the S2P polypeptide (SMVopt2P) of SARS-CoV-2
gctagcagatctcgtacggccaccatgtttgtgtttttggttttgttgccactggtgtccagtcagtgtgttaatttgacaacaagaacacagctgccaccagcctacacaaatagttttacaaggggagtgtactacccagataaggtgttcagaagtagtgttctgcatagcacacaggatctgtttctgccattctttagcaatgtgacctggttccatgctattcatgtttccggtacaaatggcaccaagcgctttgataatccagtgttgccattcaatgatggcgtgtactttgccagtaccgagaagagtaatatcattcgcggatggattttcggaaccacactggatagtaaaacccagagtctgctgattgtgaacaatgccaccaatgtggttatcaaagtgtgcgagtttcagttctgcaatgatccatttctgggcgtctactaccataagaacaacaagagttggatggaaagcgagtttagagtgtacagtagtgccaacaattgcacctttgaatacgttagccagccattcttgatggatttggagggaaagcagggcaatttcaagaatctgcgcgagttcgtgttcaagaatatcgacggatacttcaaaatctacagcaagcacacaccaatcaatcttgttagagatttgccacagggattcagtgctttggaaccattggttgatctgccaatcggaatcaatattaccagatttcaaacactgctggccctgcatagaagttatttgacaccaggcgattcaagtagtggatggacagctggtgctgctgcttattatgttggatatctgcaaccacgaacctttctgctgaagtacaatgagaatggaacaatcacagatgctgtggattgtgctcttgatccactgagtgaaacaaagtgcaccctgaagagttttaccgttgagaagggaatctaccagaccagtaattttcgagtgcagccaacagaaagtatcgtgcgcttcccaaatattacaaatctgtgcccattcggcgaagtgtttaatgctacaagatttgctagtgtgtacgcctggaatcgcaagagaattagtaattgcgtggccgattacagcgtgctgtataatagtgccagctttagcacctttaagtgctatggtgttagtcccacaaagctgaatgatctgtgctttaccaatgtgtatgccgatagttttgtgatcaggggagatgaagttcgacaaattgctccaggacagactggaaagattgccgattataactacaagctgccagatgatttcaccggatgtgtgattgcctggaacagtaacaatctggatagcaaagttggcggcaactacaattatctgtatcgcctgtttcgcaagagcaatctgaaaccatttgagcgcgatatcagcaccgaaatctatcaagctggaagtactccatgcaatggcgtggaaggttttaattgctactttccactgcagtcctacggatttcaacctactaatggtgttggataccagccatatagagtggtggttctgagttttgaattgctgcatgctccagctacagtgtgtggaccaaagaaaagtaccaacctggttaagaacaaatgcgtgaacttcaacttcaatggactgactggtacaggcgttctgactgagagtaacaagaaattcctgccatttcagcagtttggacgagatattgctgatacaacagatgcagttagagatccccaaacactggaaattctggatattaccccatgcagttttggcggagttagtgttattacacccggcacaaataccagtaatcaagttgctgtgctgtaccaggatgtgaattgcacagaagttccagttgcaattcatgcagatcagttgacaccaacatggcgagtgtatagtaccggaagtaatgtttttcagacacgagctggatgtctgattggagccgaacatgttaacaatagctacgagtgcgatattccaattggtgctggaatttgcgctagttatcagacccaaacaaatagtccaagacgagcaagaagtgtggccagtcagagtattattgcctatacaatgagtctgggagccgagaatagtgtggcctatagtaacaattccattgctatccccaccaactttaccattagtgtgacaacagagattctgccagtgtccatgacaaagacaagtgtggattgcaccatgtacatttgcggagatagtacagaatgcagtaatctgctgctgcagtatggaagtttctgtacacaactgaatagagccctgactggaattgctgtggaacaggataagaatactcaagaggtgttcgcccaagtgaagcaaatctataagaccccacctattaaggatttcggcggattcaatttcagtcagattttgccagatccaagcaagccatccaaacgcagttttattgaggacctgctgttcaacaaagtgacattggctgatgctggctttattaagcaatatggcgattgtctgggagatatagctgccagagatttgatttgcgcccaaaagtttaatggattgacagttttgccaccactgctgacagatgagatgattgctcagtatacaagtgctctgctggccggaacaattacatcaggatggacatttggagctggtgcagcattgcaaataccatttgctatgcagatggcctaccgctttaatggtattggagttacccagaacgtgctgtacgaaaatcagaagctgatcgccaatcagttcaatagcgccattggaaaaattcaggatagcctgagtagtactgctagtgctcttggaaaactgcaggatgtggttaatcagaatgctcaggctctgaatactctggttaagcagttgagttccaatttcggagctattagcagtgtgctgaacgatattctgagtcgtttggatccaccagaggccgaagttcagattgatagactgattacaggacgactgcagagcttgcagacatatgttacacaacaactgattcgagccgctgaaattagagctagtgctaatttggctgccacaaagatgagtgaatgtgtgcttggacagagcaaaagagtggatttttgcggcaaaggataccatctgatgagctttccacaaagtgctccacatggtgttgtgtttctgcatgttacttatgtgcccgctcaagagaagaatttcacaacagctccagccatttgccatgatggaaaagctcattttccacgagaaggcgtgttcgttagtaatggtactcattggttcgtgacccagcgcaatttttacgagccacagattattaccaccgacaatactttcgtgtccggcaattgtgatgttgtgattggaatcgtgaacaacacagtgtacgatccattgcagccagagctggatagttttaaagaggaactggacaagtacttcaagaaccatacaagtccagatgtggatctgggcgatattagtggaatcaatgcctccgtggtcaacatccagaaagaaattgatcgactgaacgaagtggccaagaatttgaatgagagcctgattgatctgcaagagctgggcaaatacgagcagtatattaagtggccttggtacatttggctgggattcattgctggactgattgccattgtgatggttaccattatgctgtgttgcatgacaagttgttgcagttgcctgaaaggatgctgtagttgcggtagttgctgcaagtttgatgaggatgatagtgaaccagtgctgaaaggcgtgaagctgcattatacttgataacgagcgcgcctcgaggaattc

SEQ ID NO: 64 - DNA, 3834 bp, Artificial sequence
  MV-optimized nucleotide sequence of the SdeltaF polypeptide (SMVoptdeltaF) of SARS-CoV-2
gctagcagatctcgtacggccaccatgtttgtgtttttggttttgttgccactggtgtccagtcagtgtgttaatttgacaacaagaacacagctgccaccagcctacacaaatagttttacaaggggagtgtactacccagataaggtgttcagaagtagtgttctgcatagcacacaggatctgtttctgccattctttagcaatgtgacctggttccatgctattcatgtttccggtacaaatggcaccaagcgctttgataatccagtgttgccattcaatgatggcgtgtactttgccagtaccgagaagagtaatatcattcgcggatggattttcggaaccacactggatagtaaaacccagagtctgctgattgtgaacaatgccaccaatgtggttatcaaagtgtgcgagtttcagttctgcaatgatccatttctgggcgtctactaccataagaacaacaagagttggatggaaagcgagtttagagtgtacagtagtgccaacaattgcacctttgaatacgttagccagccattcttgatggatttggagggaaagcagggcaatttcaagaatctgcgcgagttcgtgttcaagaatatcgacggatacttcaaaatctacagcaagcacacaccaatcaatcttgttagagatttgccacagggattcagtgctttggaaccattggttgatctgccaatcggaatcaatattaccagatttcaaacactgctggccctgcatagaagttatttgacaccaggcgattcaagtagtggatggacagctggtgctgctgcttattatgttggatatctgcaaccacgaacctttctgctgaagtacaatgagaatggaacaatcacagatgctgtggattgtgctcttgatccactgagtgaaacaaagtgcaccctgaagagttttaccgttgagaagggaatctaccagaccagtaattttcgagtgcagccaacagaaagtatcgtgcgcttcccaaatattacaaatctgtgcccattcggcgaagtgtttaatgctacaagatttgctagtgtgtacgcctggaatcgcaagagaattagtaattgcgtggccgattacagcgtgctgtataatagtgccagctttagcacctttaagtgctatggtgttagtcccacaaagctgaatgatctgtgctttaccaatgtgtatgccgatagttttgtgatcaggggagatgaagttcgacaaattgctccaggacagactggaaagattgccgattataactacaagctgccagatgatttcaccggatgtgtgattgcctggaacagtaacaatctggatagcaaagttggcggcaactacaattatctgtatcgcctgtttcgcaagagcaatctgaaaccatttgagcgcgatatcagcaccgaaatctatcaagctggaagtactccatgcaatggcgtggaaggttttaattgctactttccactgcagtcctacggatttcaacctactaatggtgttggataccagccatatagagtggtggttctgagttttgaattgctgcatgctccagctacagtgtgtggaccaaagaaaagtaccaacctggttaagaacaaatgcgtgaacttcaacttcaatggactgactggtacaggcgttctgactgagagtaacaagaaattcctgccatttcagcagtttggacgagatattgctgatacaacagatgcagttagagatccccaaacactggaaattctggatattaccccatgcagttttggcggagttagtgttattacacccggcacaaataccagtaatcaagttgctgtgctgtaccaggatgtgaattgcacagaagttccagttgcaattcatgcagatcagttgacaccaacatggcgagtgtatagtaccggaagtaatgtttttcagacacgagctggatgtctgattggagccgaacatgttaacaatagctacgagtgcgatattccaattggtgctggaatttgcgctagttatagtgtggccagtcagagtattattgcctatacaatgagtctgggagccgagaatagtgtggcctatagtaacaattccattgctatccccaccaactttaccattagtgtgacaacagagattctgccagtgtccatgacaaagacaagtgtggattgcaccatgtacatttgcggagatagtacagaatgcagtaatctgctgctgcagtatggaagtttctgtacacaactgaatagagccctgactggaattgctgtggaacaggataagaatactcaagaggtgttcgcccaagtgaagcaaatctataagaccccacctattaaggatttcggcggattcaatttcagtcagattttgccagatccaagcaagccatccaaacgcagttttattgaggacctgctgttcaacaaagtgacattggctgatgctggctttattaagcaatatggcgattgtctgggagatatagctgccagagatttgatttgcgcccaaaagtttaatggattgacagttttgccaccactgctgacagatgagatgattgctcagtatacaagtgctctgctggccggaacaattacatcaggatggacatttggagctggtgcagcattgcaaataccatttgctatgcagatggcctaccgctttaatggtattggagttacccagaacgtgctgtacgaaaatcagaagctgatcgccaatcagttcaatagcgccattggaaaaattcaggatagcctgagtagtactgctagtgctcttggaaaactgcaggatgtggttaatcagaatgctcaggctctgaatactctggttaagcagttgagttccaatttcggagctattagcagtgtgctgaacgatattctgagtcgtttggataaggttgaggccgaagttcagattgatagactgattacaggacgactgcagagcttgcagacatatgttacacaacaactgattcgagccgctgaaattagagctagtgctaatttggctgccacaaagatgagtgaatgtgtgcttggacagagcaaaagagtggatttttgcggcaaaggataccatctgatgagctttccacaaagtgctccacatggtgttgtgtttctgcatgttacttatgtgcccgctcaagagaagaatttcacaacagctccagccatttgccatgatggaaaagctcattttccacgagaaggcgtgttcgttagtaatggtactcattggttcgtgacccagcgcaatttttacgagccacagattattaccaccgacaatactttcgtgtccggcaattgtgatgttgtgattggaatcgtgaacaacacagtgtacgatccattgcagccagagctggatagttttaaagaggaactggacaagtacttcaagaaccatacaagtccagatgtggatctgggcgatattagtggaatcaatgcctccgtggtcaacatccagaaagaaattgatcgactgaacgaagtggccaagaatttgaatgagagcctgattgatctgcaagagctgggcaaatacgagcagtatattaagtggccttggtacatttggctgggattcattgctggactgattgccattgtgatggttaccattatgctgtgttgcatgacaagttgttgcagttgcctgaaaggatgctgtagttgcggtagttgctgcaagtttgatgaggatgatagtgaaccagtgctgaaaggcgtgaagctgcattatacttgataagcgcgcctcgaggaattc

SEQ ID NO: 65 - protein, 1262 aa, Artificial sequence
  SdeltaF polypeptide of SARS-CoV-2
MFVFLVLLPLVSSQCVNLTTRTQLPPAYTNSFTRGVYYPDKVFRSSVLHSTQDLFLPFFSNVTWFHAIHVSGTNGTKRFDNPVLPFNDGVYFASTEKSNIIRGWIFGTTLDSKTQSLLIVNNATNVVIKVCEFQFCNDPFLGVYYHKNNKSWMESEFRVYSSANNCTFEYVSQPFLMDLEGKQGNFKNLREFVFKNIDGYFKIYSKHTPINLVRDLPQGFSALEPLVDLPIGINITRFQTLLALHRSYLTPGDSSSGWTAGAAAYYVGYLQPRTFLLKYNENGTITDAVDCALDPLSETKCTLKSFTVEKGIYQTSNFRVQPTESIVRFPNITNLCPFGEVFNATRFASVYAWNRKRISNCVADYSVLYNSASFSTFKCYGVSPTKLNDLCFTNVYADSFVIRGDEVRQIAPGQTGKIADYNYKLPDDFTGCVIAWNSNNLDSKVGGNYNYLYRLFRKSNLKPFERDISTEIYQAGSTPCNGVEGFNCYFPLQSYGFQPTNGVGYQPYRVVVLSFELLHAPATVCGPKKSTNLVKNKCVNFNFNGLTGTGVLTESNKKFLPFQQFGRDIADTTDAVRDPQTLEILDITPCSFGGVSVITPGTNTSNQVAVLYQDVNCTEVPVAIHADQLTPTWRVYSTGSNVFQTRAGCLIGAEHVNNSYECDIPIGAGICASYSVASQSIIAYTMSLGAENSVAYSNNSIAIPTNFTISVTTEILPVSMTKTSVDCTMYICGDSTECSNLLLQYGSFCTQLNRALTGIAVEQDKNTQEVFAQVKQIYKTPPIKDFGGFNFSQILPDPSKPSKRSFIEDLLFNKVTLADAGFIKQYGDCLGDIAARDLICAQKFNGLTVLPPLLTDEMIAQYTSALLAGTITSGWTFGAGAALQIPFAMQMAYRFNGIGVTQNVLYENQKLIANQFNSAIGKIQDSLSSTASALGKLQDVVNQNAQALNTLVKQLSSNFGAISSVLNDILSRLDKVEAEVQIDRLITGRLQSLQTYVTQQLIRAAEIRASANLAATKMSECVLGQSKRVDFCGKGYHLMSFPQSAPHGVVFLHVTYVPAQEKNFTTAPAICHDGKAHFPREGVFVSNGTHWFVTQRNFYEPQIITTDNTFVSGNCDVVIGIVNNTVYDPLQPELDSFKEELDKYFKNHTSPDVDLGDISGINASVVNIQKEIDRLNEVAKNLNESLIDLQELGKYEQYIKWPWYIWLGFIAGLIAIVMVTIMLCCMTSCCSCLKGCCSCGSCCKFDEDDSEPVLKGVKLHYT

SEQ ID NO: 66 - DNA, 3834 bp, Artificial sequence
  MV-optimized nucleotide sequence of the S2PdeltaF polypeptide (SMVopt2PdeltaF) of SARS-CoV-2
gctagcagatctcgtacggccaccatgtttgtgtttttggttttgttgccactggtgtccagtcagtgtgttaatttgacaacaagaacacagctgccaccagcctacacaaatagttttacaaggggagtgtactacccagataaggtgttcagaagtagtgttctgcatagcacacaggatctgtttctgccattctttagcaatgtgacctggttccatgctattcatgtttccggtacaaatggcaccaagcgctttgataatccagtgttgccattcaatgatggcgtgtactttgccagtaccgagaagagtaatatcattcgcggatggattttcggaaccacactggatagtaaaacccagagtctgctgattgtgaacaatgccaccaatgtggttatcaaagtgtgcgagtttcagttctgcaatgatccatttctgggcgtctactaccataagaacaacaagagttggatggaaagcgagtttagagtgtacagtagtgccaacaattgcacctttgaatacgttagccagccattcttgatggatttggagggaaagcagggcaatttcaagaatctgcgcgagttcgtgttcaagaatatcgacggatacttcaaaatctacagcaagcacacaccaatcaatcttgttagagatttgccacagggattcagtgctttggaaccattggttgatctgccaatcggaatcaatattaccagatttcaaacactgctggccctgcatagaagttatttgacaccaggcgattcaagtagtggatggacagctggtgctgctgcttattatgttggatatctgcaaccacgaacctttctgctgaagtacaatgagaatggaacaatcacagatgctgtggattgtgctcttgatccactgagtgaaacaaagtgcaccctgaagagttttaccgttgagaagggaatctaccagaccagtaattttcgagtgcagccaacagaaagtatcgtgcgcttcccaaatattacaaatctgtgcccattcggcgaagtgtttaatgctacaagatttgctagtgtgtacgcctggaatcgcaagagaattagtaattgcgtggccgattacagcgtgctgtataatagtgccagctttagcacctttaagtgctatggtgttagtcccacaaagctgaatgatctgtgctttaccaatgtgtatgccgatagttttgtgatcaggggagatgaagttcgacaaattgctccaggacagactggaaagattgccgattataactacaagctgccagatgatttcaccggatgtgtgattgcctggaacagtaacaatctggatagcaaagttggcggcaactacaattatctgtatcgcctgtttcgcaagagcaatctgaaaccatttgagcgcgatatcagcaccgaaatctatcaagctggaagtactccatgcaatggcgtggaaggttttaattgctactttccactgcagtcctacggatttcaacctactaatggtgttggataccagccatatagagtggtggttctgagttttgaattgctgcatgctccagctacagtgtgtggaccaaagaaaagtaccaacctggttaagaacaaatgcgtgaacttcaacttcaatggactgactggtacaggcgttctgactgagagtaacaagaaattcctgccatttcagcagtttggacgagatattgctgatacaacagatgcagttagagatccccaaacactggaaattctggatattaccccatgcagttttggcggagttagtgttattacacccggcacaaataccagtaatcaagttgctgtgctgtaccaggatgtgaattgcacagaagttccagttgcaattcatgcagatcagttgacaccaacatggcgagtgtatagtaccggaagtaatgtttttcagacacgagctggatgtctgattggagccgaacatgttaacaatagctacgagtgcgatattccaattggtgctggaatttgcgctagttatagtgtggccagtcagagtattattgcctatacaatgagtctgggagccgagaatagtgtggcctatagtaacaattccattgctatccccaccaactttaccattagtgtgacaacagagattctgccagtgtccatgacaaagacaagtgtggattgcaccatgtacatttgcggagatagtacagaatgcagtaatctgctgctgcagtatggaagtttctgtacacaactgaatagagccctgactggaattgctgtggaacaggataagaatactcaagaggtgttcgcccaagtgaagcaaatctataagaccccacctattaaggatttcggcggattcaatttcagtcagattttgccagatccaagcaagccatccaaacgcagttttattgaggacctgctgttcaacaaagtgacattggctgatgctggctttattaagcaatatggcgattgtctgggagatatagctgccagagatttgatttgcgcccaaaagtttaatggattgacagttttgccaccactgctgacagatgagatgattgctcagtatacaagtgctctgctggccggaacaattacatcaggatggacatttggagctggtgcagcattgcaaataccatttgctatgcagatggcctaccgctttaatggtattggagttacccagaacgtgctgtacgaaaatcagaagctgatcgccaatcagttcaatagcgccattggaaaaattcaggatagcctgagtagtactgctagtgctcttggaaaactgcaggatgtggttaatcagaatgctcaggctctgaatactctggttaagcagttgagttccaatttcggagctattagcagtgtgctgaacgatattctgagtcgtttggatccaccagaggccgaagttcagattgatagactgattacaggacgactgcagagcttgcagacatatgttacacaacaactgattcgagccgctgaaattagagctagtgctaatttggctgccacaaagatgagtgaatgtgtgcttggacagagcaaaagagtggatttttgcggcaaaggataccatctgatgagctttccacaaagtgctccacatggtgttgtgtttctgcatgttacttatgtgcccgctcaagagaagaatttcacaacagctccagccatttgccatgatggaaaagctcattttccacgagaaggcgtgttcgttagtaatggtactcattggttcgtgacccagcgcaatttttacgagccacagattattaccaccgacaatactttcgtgtccggcaattgtgatgttgtgattggaatcgtgaacaacacagtgtacgatccattgcagccagagctggatagttttaaagaggaactggacaagtacttcaagaaccatacaagtccagatgtggatctgggcgatattagtggaatcaatgcctccgtggtcaacatccagaaagaaattgatcgactgaacgaagtggccaagaatttgaatgagagcctgattgatctgcaagagctgggcaaatacgagcagtatattaagtggccttggtacatttggctgggattcattgctggactgattgccattgtgatggttaccattatgctgtgttgcatgacaagttgttgcagttgcctgaaaggatgctgtagttgcggtagttgctgcaagtttgatgaggatgatagtgaaccagtgctgaaaggcgtgaagctgcattatacttgataagcgcgcctcgaggaattc

SEQ ID NO: 67 - protein, 9 aa, Artificial sequence
  measles H22-30 peptide
RIVINREHL

SEQ ID NO: 68 - protein, 9 aa, Artificial sequence
  measles H446-454 peptide
SNHNNVYWL

SEQ ID NO: 69 - protein, 9 aa, Artificial sequence
  NP366 (SCOT) peptide
ASNENMDTM

SEQ ID NO: 70 - DNA, 26 bp, Artificial sequence
  E_Sarbeco_F1 primer
acaggtacgttaatagttaatagcgt

SEQ ID NO: 71 - DNA, 22 bp, Artificial sequence
  E_Sarbeco_R2 primer
atattgcagcagtacgcacaca

SEQ ID NO: 72 - DNA, 26 bp, Artificial sequence
  E_Sarbeco_P1 primer (FAM in 5' and BHQ-1 in 3')
acactagccatccttactgcgcttcg

SEQ ID NO: 73 - DNA, 3810 bp, Artificial sequence
  Codon-optimized nucleotide sequence of the SF-dER polypeptide of SARS-CoV-2
cgtacggccaccatgttcgtctttctggtattgcttcctctggtgagttcccagtgcgtgaacctgacgactcggacacagctgccgcctgcatacacaaacagcttcacacgaggtgtttactatccggacaaggtgttccggtcctctgtcttgcacagtactcaggacctttttctgccattctttagtaacgtaacatggttccacgctatccatgtaagtggaaccaatggcaccaagcgcttcgacaatccagtcctgcctttcaacgatggcgtctacttcgcctctaccgagaaatcaaatattattagagggtggatcttcgggaccacccttgatagcaagactcagagtcttctgatcgtgaacaatgctactaacgtcgtcataaaagtatgtgaatttcagttctgcaatgaccccttcctgggcgtgtactatcacaaaaataacaagtcctggatggaatccgagtttcgggtatacagcagcgctaataactgtaccttcgaatatgtgagccagccattcctgatggacctggaggggaagcagggcaacttcaaaaacctgagggaattcgtgttcaagaacattgacggatacttcaaaatctacagcaagcacactccaattaatcttgttagggaccttcctcaggggttctccgcgctggaacccttggtggatctgccaattggtattaacatcacgaggtttcaaaccctgctcgccctccaccggtcatacctgaccccaggtgatagtagtagtggctggacagcaggggccgcagcatactacgtcggctacctccagccccgcacattcctgctgaagtataatgaaaacggtactattacagatgctgtggactgcgcacttgatccattgtccgagactaaatgcaccttgaagtcttttaccgttgagaagggaatctatcagaccagtaatttcagagtgcaacccaccgagagcatcgtgcgatttcctaatattacaaacctgtgcccttttggcgaggtgtttaacgccactcgcttcgcgagcgtgtatgcatggaaccggaaaaggattagcaactgcgtggctgattattcagtcctttataatagtgcctctttcagtacgttcaaatgctatggagtgtccccaactaagcttaacgatctgtgttttaccaacgtgtatgccgactctttcgtcatcaggggcgacgaggttagacaaattgcgcccggacagacaggcaaaattgctgactacaattataaactgccagatgactttacaggatgcgtgattgcctggaacagcaacaaccttgattctaaggtgggcggaaactacaactatctgtacaggctgttccgcaaatcaaacctgaagccattcgaaagggacatttcaactgagatctaccaggccggatctacaccttgcaacggggtggaaggattcaactgctacttcccgctccagtcatatggctttcaacctaccaatggagtgggctaccaaccttatcgagtagttgttctctctttcgagttgttgcatgccccagccactgtctgcggaccaaagaaatccaccaatctggtgaaaaacaagtgcgtcaacttcaacttcaatggactcaccggtacaggggttcttaccgagtcaaacaagaaattccttccgtttcagcagtttggacgcgatatcgccgacactacggatgcagtacgcgatcctcagacacttgagatcctggacatcactccatgctcttttggaggggtgtctgtcatcactcccgggacgaataccagtaatcaggtcgccgtgctctatcaagatgtcaactgcacagaggtgccagtcgccattcacgccgatcagcttacccctacttggcgagtatatagcacagggtccaacgtgtttcagacaagggcgggttgtctgatcggcgctgagcacgtcaataatagctacgaatgtgacatccctattggagccgggatttgcgctagctatcagactcagactaactcaccccggcgagctaggtctgtagcaagtcagagtatcatagcctatactatgagcctgggggcagaaaattctgtcgcttatagtaataacagtattgcaattcctactaacttcactattagcgtgactacagaaattctgccagtgagcatgaccaagacctccgtcgactgtaccatgtatatctgcggagacagcacagaatgcagcaacctgcttctgcagtacggtagcttttgtacccagctgaacagggcactgaccggcatcgctgtggaacaggacaaaaatacgcaggaggtgttcgctcaggtcaagcagatttataagacacccccaataaaagacttcggcggctttaacttctcccagatcctgcccgatccgtcaaaaccttccaagagaagttttatcgaggatctgctgtttaacaaagtaacattggctgatgctggctttattaaacagtacggcgattgtctgggagatatcgccgctagagatctgatctgcgctcaaaaatttaatggcctcactgtattgccccccctgctgacggatgaaatgattgcccaatacacatcagccctgctggctgggacaatcacttccggctggacgttcggtgctggagctgctcttcaaattccatttgccatgcaaatggcttatagattcaacggaattggcgtgacccaaaacgtgctgtacgaaaatcaaaagctgattgctaatcagtttaactccgctatcggtaagatacaggacagcctgtctagtactgccagcgccctcggaaagctccaggatgtggtgaaccagaatgcgcaggcgctgaacacactcgtcaaacagcttagcagcaatttcggcgcaattagcagtgtactgaacgacatcttgtctcggctcgacaaggtcgaggccgaagtgcagattgatcgcctgatcactggccggctccagtctctgcagacctacgtaacccagcaactcatacgcgctgccgaaattcgggcttcagctaacctggccgcaacaaagatgtctgaatgtgttcttgggcagtccaagagggtggacttctgcgggaaaggatatcacctgatgtccttccctcagagcgcccctcatggagtggtgtttcttcatgttacctatgttccggcccaggaaaagaattttaccactgccccagccatttgccatgatggtaaagcacacttcccaagagagggcgtgtttgttagtaacggcacccactggttcgttacccagcgcaatttttacgaacctcaaatcattaccactgacaatacatttgtatcaggcaattgcgacgtggtgatcggaatcgtaaataatacagtctacgatcccctgcagccagagcttgacagctttaaagaggaactggacaaatacttcaaaaatcatacaagccccgacgtcgacctgggagatatttctggcatcaatgcctccgtcgtgaatatccaaaaagagatcgaccgccttaatgaggttgccaaaaacctcaacgagtccctgattgatctgcaggagctggggaagtacgagcagtatatcaaatggccctggtacatctggctgggcttcattgccgggctcatagccatcgtgatggtgacgatcatgctgtgttgcatgacctcttgctgttcttgtctgaaggggtgctgctcttgtgggagttgttgtaaattcgatgaggatgattccgaataataggcgcgc

SEQ ID NO: 74 - protein, 1262 aa, Artificial sequence
  SF-dER polypeptide of SARS-CoV-2
MFVFLVLLPLVSSQCVNLTTRTQLPPAYTNSFTRGVYYPDKVFRSSVLHSTQDLFLPFFSNVTWFHAIHVSGTNGTKRFDNPVLPFNDGVYFASTEKSNIIRGWIFGTTLDSKTQSLLIVNNATNVVIKVCEFQFCNDPFLGVYYHKNNKSWMESEFRVYSSANNCTFEYVSQPFLMDLEGKQGNFKNLREFVFKNIDGYFKIYSKHTPINLVRDLPQGFSALEPLVDLPIGINITRFQTLLALHRSYLTPGDSSSGWTAGAAAYYVGYLQPRTFLLKYNENGTITDAVDCALDPLSETKCTLKSFTVEKGIYQTSNFRVQPTESIVRFPNITNLCPFGEVFNATRFASVYAWNRKRISNCVADYSVLYNSASFSTFKCYGVSPTKLNDLCFTNVYADSFVIRGDEVRQIAPGQTGKIADYNYKLPDDFTGCVIAWNSNNLDSKVGGNYNYLYRLFRKSNLKPFERDISTEIYQAGSTPCNGVEGFNCYFPLQSYGFQPTNGVGYQPYRVVVLSFELLHAPATVCGPKKSTNLVKNKCVNFNFNGLTGTGVLTESNKKFLPFQQFGRDIADTTDAVRDPQTLEILDITPCSFGGVSVITPGTNTSNQVAVLYQDVNCTEVPVAIHADQLTPTWRVYSTGSNVFQTRAGCLIGAEHVNNSYECDIPIGAGICASYQTQTNSPRRARSVASQSIIAYTMSLGAENSVAYSNNSIAIPTNFTISVTTEILPVSMTKTSVDCTMYICGDSTECSNLLLQYGSFCTQLNRALTGIAVEQDKNTQEVFAQVKQIYKTPPIKDFGGFNFSQILPDPSKPSKRSFIEDLLFNKVTLADAGFIKQYGDCLGDIAARDLICAQKFNGLTVLPPLLTDEMIAQYTSALLAGTITSGWTFGAGAALQIPFAMQMAYRFNGIGVTQNVLYENQKLIANQFNSAIGKIQDSLSSTASALGKLQDVVNQNAQALNTLVKQLSSNFGAISSVLNDILSRLDKVEAEVQIDRLITGRLQSLQTYVTQQLIRAAEIRASANLAATKMSECVLGQSKRVDFCGKGYHLMSFPQSAPHGVVFLHVTYVPAQEKNFTTAPAICHDGKAHFPREGVFVSNGTHWFVTQRNFYEPQIITTDNTFVSGNCDVVIGIVNNTVYDPLQPELDSFKEELDKYFKNHTSPDVDLGDISGINASVVNIQKEIDRLNEVAKNLNESLIDLQELGKYEQYIKWPWYIWLGFIAGLIAIVMVTIMLCCMTSCCSCLKGCCSCGSCCKFDEDDSE

SEQ ID NO: 75 - DNA, 3810 bp, Artificial sequence
  Codon-optimized nucleotide sequence of the SF-2P-dER polypeptide of SARS-CoV-2
cgtacggccaccatgttcgtctttctggtattgcttcctctggtgagttcccagtgcgtgaacctgacgactcggacacagctgccgcctgcatacacaaacagcttcacacgaggtgtttactatccggacaaggtgttccggtcctctgtcttgcacagtactcaggacctttttctgccattctttagtaacgtaacatggttccacgctatccatgtaagtggaaccaatggcaccaagcgcttcgacaatccagtcctgcctttcaacgatggcgtctacttcgcctctaccgagaaatcaaatattattagagggtggatcttcgggaccacccttgatagcaagactcagagtcttctgatcgtgaacaatgctactaacgtcgtcataaaagtatgtgaatttcagttctgcaatgaccccttcctgggcgtgtactatcacaaaaataacaagtcctggatggaatccgagtttcgggtatacagcagcgctaataactgtaccttcgaatatgtgagccagccattcctgatggacctggaggggaagcagggcaacttcaaaaacctgagggaattcgtgttcaagaacattgacggatacttcaaaatctacagcaagcacactccaattaatcttgttagggaccttcctcaggggttctccgcgctggaacccttggtggatctgccaattggtattaacatcacgaggtttcaaaccctgctcgccctccaccggtcatacctgaccccaggtgatagtagtagtggctggacagcaggggccgcagcatactacgtcggctacctccagccccgcacattcctgctgaagtataatgaaaacggtactattacagatgctgtggactgcgcacttgatccattgtccgagactaaatgcaccttgaagtcttttaccgttgagaagggaatctatcagaccagtaatttcagagtgcaacccaccgagagcatcgtgcgatttcctaatattacaaacctgtgcccttttggcgaggtgtttaacgccactcgcttcgcgagcgtgtatgcatggaaccggaaaaggattagcaactgcgtggctgattattcagtcctttataatagtgcctctttcagtacgttcaaatgctatggagtgtccccaactaagcttaacgatctgtgttttaccaacgtgtatgccgactctttcgtcatcaggggcgacgaggttagacaaattgcgcccggacagacaggcaaaattgctgactacaattataaactgccagatgactttacaggatgcgtgattgcctggaacagcaacaaccttgattctaaggtgggcggaaactacaactatctgtacaggctgttccgcaaatcaaacctgaagccattcgaaagggacatttcaactgagatctaccaggccggatctacaccttgcaacggggtggaaggattcaactgctacttcccgctccagtcatatggctttcaacctaccaatggagtgggctaccaaccttatcgagtagttgttctctctttcgagttgttgcatgccccagccactgtctgcggaccaaagaaatccaccaatctggtgaaaaacaagtgcgtcaacttcaacttcaatggactcaccggtacaggggttcttaccgagtcaaacaagaaattccttccgtttcagcagtttggacgcgatatcgccgacactacggatgcagtacgcgatcctcagacacttgagatcctggacatcactccatgctcttttggaggggtgtctgtcatcactcccgggacgaataccagtaatcaggtcgccgtgctctatcaagatgtcaactgcacagaggtgccagtcgccattcacgccgatcagcttacccctacttggcgagtatatagcacagggtccaacgtgtttcagacaagggcgggttgtctgatcggcgctgagcacgtcaataatagctacgaatgtgacatccctattggagccgggatttgcgctagctatcagactcagactaactcaccccggcgagctaggtctgtagcaagtcagagtatcatagcctatactatgagcctgggggcagaaaattctgtcgcttatagtaataacagtattgcaattcctactaacttcactattagcgtgactacagaaattctgccagtgagcatgaccaagacctccgtcgactgtaccatgtatatctgcggagacagcacagaatgcagcaacctgcttctgcagtacggtagcttttgtacccagctgaacagggcactgaccggcatcgctgtggaacaggacaaaaatacgcaggaggtgttcgctcaggtcaagcagatttataagacacccccaataaaagacttcggcggctttaacttctcccagatcctgcccgatccgtcaaaaccttccaagagaagttttatcgaggatctgctgtttaacaaagtaacattggctgatgctggctttattaaacagtacggcgattgtctgggagatatcgccgctagagatctgatctgcgctcaaaaatttaatggcctcactgtattgccccccctgctgacggatgaaatgattgcccaatacacatcagccctgctggctgggacaatcacttccggctggacgttcggtgctggagctgctcttcaaattccatttgccatgcaaatggcttatagattcaacggaattggcgtgacccaaaacgtgctgtacgaaaatcaaaagctgattgctaatcagtttaactccgctatcggtaagatacaggacagcctgtctagtactgccagcgccctcggaaagctccaggatgtggtgaaccagaatgcgcaggcgctgaacacactcgtcaaacagcttagcagcaatttcggcgcaattagcagtgtactgaacgacatcttgtctcggctcgacccaccagaggccgaagtgcagattgatcgcctgatcactggccggctccagtctctgcagacctacgtaacccagcaactcatacgcgctgccgaaattcgggcttcagctaacctggccgcaacaaagatgtctgaatgtgttcttgggcagtccaagagggtggacttctgcgggaaaggatatcacctgatgtccttccctcagagcgcccctcatggagtggtgtttcttcatgttacctatgttccggcccaggaaaagaattttaccactgccccagccatttgccatgatggtaaagcacacttcccaagagagggcgtgtttgttagtaacggcacccactggttcgttacccagcgcaatttttacgaacctcaaatcattaccactgacaatacatttgtatcaggcaattgcgacgtggtgatcggaatcgtaaataatacagtctacgatcccctgcagccagagcttgacagctttaaagaggaactggacaaatacttcaaaaatcatacaagccccgacgtcgacctgggagatatttctggcatcaatgcctccgtcgtgaatatccaaaaagagatcgaccgccttaatgaggttgccaaaaacctcaacgagtccctgattgatctgcaggagctggggaagtacgagcagtatatcaaatggccctggtacatctggctgggcttcattgccgggctcatagccatcgtgatggtgacgatcatgctgtgttgcatgacctcttgctgttcttgtctgaaggggtgctgctcttgtgggagttgttgtaaattcgatgaggatgattccgaataataggcgcgc

SEQ ID NO: 76 - protein, 1262 aa, Artificial sequence
  SF-2P-dER polypeptide of SARS-CoV-2
MFVFLVLLPLVSSQCVNLTTRTQLPPAYTNSFTRGVYYPDKVFRSSVLHSTQDLFLPFFSNVTWFHAIHVSGTNGTKRFDNPVLPFNDGVYFASTEKSNIIRGWIFGTTLDSKTQSLLIVNNATNVVIKVCEFQFCNDPFLGVYYHKNNKSWMESEFRVYSSANNCTFEYVSQPFLMDLEGKQGNFKNLREFVFKNIDGYFKIYSKHTPINLVRDLPQGFSALEPLVDLPIGINITRFQTLLALHRSYLTPGDSSSGWTAGAAAYYVGYLQPRTFLLKYNENGTITDAVDCALDPLSETKCTLKSFTVEKGIYQTSNFRVQPTESIVRFPNITNLCPFGEVFNATRFASVYAWNRKRISNCVADYSVLYNSASFSTFKCYGVSPTKLNDLCFTNVYADSFVIRGDEVRQIAPGQTGKIADYNYKLPDDFTGCVIAWNSNNLDSKVGGNYNYLYRLFRKSNLKPFERDISTEIYQAGSTPCNGVEGFNCYFPLQSYGFQPTNGVGYQPYRVVVLSFELLHAPATVCGPKKSTNLVKNKCVNFNFNGLTGTGVLTESNKKFLPFQQFGRDIADTTDAVRDPQTLEILDITPCSFGGVSVITPGTNTSNQVAVLYQDVNCTEVPVAIHADQLTPTWRVYSTGSNVFQTRAGCLIGAEHVNNSYECDIPIGAGICASYQTQTNSPRRARSVASQSIIAYTMSLGAENSVAYSNNSIAIPTNFTISVTTEILPVSMTKTSVDCTMYICGDSTECSNLLLQYGSFCTQLNRALTGIAVEQDKNTQEVFAQVKQIYKTPPIKDFGGFNFSQILPDPSKPSKRSFIEDLLFNKVTLADAGFIKQYGDCLGDIAARDLICAQKFNGLTVLPPLLTDEMIAQYTSALLAGTITSGWTFGAGAALQIPFAMQMAYRFNGIGVTQNVLYENQKLIANQFNSAIGKIQDSLSSTASALGKLQDVVNQNAQALNTLVKQLSSNFGAISSVLNDILSRLDPPEAEVQIDRLITGRLQSLQTYVTQQLIRAAEIRASANLAATKMSECVLGQSKRVDFCGKGYHLMSFPQSAPHGVVFLHVTYVPAQEKNFTTAPAICHDGKAHFPREGVFVSNGTHWFVTQRNFYEPQIITTDNTFVSGNCDVVIGIVNNTVYDPLQPELDSFKEELDKYFKNHTSPDVDLGDISGINASVVNIQKEIDRLNEVAKNLNESLIDLQELGKYEQYIKWPWYIWLGFIAGLIAIVMVTIMLCCMTSCCSCLKGCCSCGSCCKFDEDDSE

SEQ ID NO: 77 - DNA, 1794 bp, Artificial sequence
  Codon-optimized nucleotide sequence of the S2-dER polypeptide of SARS-CoV-2
cgtacggccaccatgttcgtctttctggtattgcttcctctggtgagttcccagtgcgtagcaagtcagagtatcatagcctatactatgagcctgggggcagaaaattctgtcgcttatagtaataacagtattgcaattcctactaacttcactattagcgtgactacagaaattctgccagtgagcatgaccaagacctccgtcgactgtaccatgtatatctgcggagacagcacagaatgcagcaacctgcttctgcagtacggtagcttttgtacccagctgaacagggcactgaccggcatcgctgtggaacaggacaaaaatacgcaggaggtgttcgctcaggtcaagcagatttataagacacccccaataaaagacttcggcggctttaacttctcccagatcctgcccgatccgtcaaaaccttccaagagaagttttatcgaggatctgctgtttaacaaagtaacattggctgatgctggctttattaaacagtacggcgattgtctgggagatatcgccgctagagatctgatctgcgctcaaaaatttaatggcctcactgtattgccccccctgctgacggatgaaatgattgcccaatacacatcagccctgctggctgggacaatcacttccggctggacgttcggtgctggagctgctcttcaaattccatttgccatgcaaatggcttatagattcaacggaattggcgtgacccaaaacgtgctgtacgaaaatcaaaagctgattgctaatcagtttaactccgctatcggtaagatacaggacagcctgtctagtactgccagcgccctcggaaagctccaggatgtggtgaaccagaatgcgcaggcgctgaacacactcgtcaaacagcttagcagcaatttcggcgcaattagcagtgtactgaacgacatcttgtctcggctcgacaaggtcgaggccgaagtgcagattgatcgcctgatcactggccggctccagtctctgcagacctacgtaacccagcaactcatacgcgctgccgaaattcgggcttcagctaacctggccgcaacaaagatgtctgaatgtgttcttgggcagtccaagagggtggacttctgcgggaaaggatatcacctgatgtccttccctcagagcgcccctcatggagtggtgtttcttcatgttacctatgttccggcccaggaaaagaattttaccactgccccagccatttgccatgatggtaaagcacacttcccaagagagggcgtgtttgttagtaacggcacccactggttcgttacccagcgcaatttttacgaacctcaaatcattaccactgacaatacatttgtatcaggcaattgcgacgtggtgatcggaatcgtaaataatacagtctacgatcccctgcagccagagcttgacagctttaaagaggaactggacaaatacttcaaaaatcatacaagccccgacgtcgacctgggagatatttctggcatcaatgcctccgtcgtgaatatccaaaaagagatcgaccgccttaatgaggttgccaaaaacctcaacgagtccctgattgatctgcaggagctggggaagtacgagcagtatatcaaatggccctggtacatctggctgggcttcattgccgggctcatagccatcgtgatggtgacgatcatgctgtgttgcatgacctcttgctgttcttgtctgaaggggtgctgctcttgtgggagttgttgtaaattcgatgaggatgattccgaataagcgcgc

SEQ ID NO: 78 - protein, 591 aa, Artificial sequence
  S2-dER polypeptide of SARS-CoV-2
MFVFLVLLPLVSSQCVASQSIIAYTMSLGAENSVAYSNNSIAIPTNFTISVTTEILPVSMTKTSVDCTMYICGDSTECSNLLLQYGSFCTQLNRALTGIAVEQDKNTQEVFAQVKQIYKTPPIKDFGGFNFSQILPDPSKPSKRSFIEDLLFNKVTLADAGFIKQYGDCLGDIAARDLICAQKFNGLTVLPPLLTDEMIAQYTSALLAGTITSGWTFGAGAALQIPFAMQMAYRFNGIGVTQNVLYENQKLIANQFNSAIGKIQDSLSSTASALGKLQDVVNQNAQALNTLVKQLSSNFGAISSVLNDILSRLDKVEAEVQIDRLITGRLQSLQTYVTQQLIRAAEIRASANLAATKMSECVLGQSKRVDFCGKGYHLMSFPQSAPHGVVFLHVTYVPAQEKNFTTAPAICHDGKAHFPREGVFVSNGTHWFVTQRNFYEPQIITTDNTFVSGNCDVVIGIVNNTVYDPLQPELDSFKEELDKYFKNHTSPDVDLGDISGINASVVNIQKEIDRLNEVAKNLNESLIDLQELGKYEQYIKWPWYIWLGFIAGLIAIVMVTIMLCCMTSCCSCLKGCCSCGSCCKFDEDDSE

SEQ ID NO: 79 - DNA, 1794 bp, Artificial sequence
  Codon-optimized nucleotide sequence of the S2-2P-dER polypeptide of SARS-CoV-2
cgtacggccaccatgttcgtctttctggtattgcttcctctggtgagttcccagtgcgtagcaagtcagagtatcatagcctatactatgagcctgggggcagaaaattctgtcgcttatagtaataacagtattgcaattcctactaacttcactattagcgtgactacagaaattctgccagtgagcatgaccaagacctccgtcgactgtaccatgtatatctgcggagacagcacagaatgcagcaacctgcttctgcagtacggtagcttttgtacccagctgaacagggcactgaccggcatcgctgtggaacaggacaaaaatacgcaggaggtgttcgctcaggtcaagcagatttataagacacccccaataaaagacttcggcggctttaacttctcccagatcctgcccgatccgtcaaaaccttccaagagaagttttatcgaggatctgctgtttaacaaagtaacattggctgatgctggctttattaaacagtacggcgattgtctgggagatatcgccgctagagatctgatctgcgctcaaaaatttaatggcctcactgtattgccccccctgctgacggatgaaatgattgcccaatacacatcagccctgctggctgggacaatcacttccggctggacgttcggtgctggagctgctcttcaaattccatttgccatgcaaatggcttatagattcaacggaattggcgtgacccaaaacgtgctgtacgaaaatcaaaagctgattgctaatcagtttaactccgctatcggtaagatacaggacagcctgtctagtactgccagcgccctcggaaagctccaggatgtggtgaaccagaatgcgcaggcgctgaacacactcgtcaaacagcttagcagcaatttcggcgcaattagcagtgtactgaacgacatcttgtctcggctcgacccaccagaggccgaagtgcagattgatcgcctgatcactggccggctccagtctctgcagacctacgtaacccagcaactcatacgcgctgccgaaattcgggcttcagctaacctggccgcaacaaagatgtctgaatgtgttcttgggcagtccaagagggtggacttctgcgggaaaggatatcacctgatgtccttccctcagagcgcccctcatggagtggtgtttcttcatgttacctatgttccggcccaggaaaagaattttaccactgccccagccatttgccatgatggtaaagcacacttcccaagagagggcgtgtttgttagtaacggcacccactggttcgttacccagcgcaatttttacgaacctcaaatcattaccactgacaatacatttgtatcaggcaattgcgacgtggtgatcggaatcgtaaataatacagtctacgatcccctgcagccagagcttgacagctttaaagaggaactggacaaatacttcaaaaatcatacaagccccgacgtcgacctgggagatatttctggcatcaatgcctccgtcgtgaatatccaaaaagagatcgaccgccttaatgaggttgccaaaaacctcaacgagtccctgattgatctgcaggagctggggaagtacgagcagtatatcaaatggccctggtacatctggctgggcttcattgccgggctcatagccatcgtgatggtgacgatcatgctgtgttgcatgacctcttgctgttcttgtctgaaggggtgctgctcttgtgggagttgttgtaaattcgatgaggatgattccgaataagcgcgc

SEQ ID NO: 80 - protein, 591 aa, Artificial sequence
  S2-2P-dER polypeptide of SARS-CoV-2
MFVFLVLLPLVSSQCVASQSIIAYTMSLGAENSVAYSNNSIAIPTNFTISVTTEILPVSMTKTSVDCTMYICGDSTECSNLLLQYGSFCTQLNRALTGIAVEQDKNTQEVFAQVKQIYKTPPIKDFGGFNFSQILPDPSKPSKRSFIEDLLFNKVTLADAGFIKQYGDCLGDIAARDLICAQKFNGLTVLPPLLTDEMIAQYTSALLAGTITSGWTFGAGAALQIPFAMQMAYRFNGIGVTQNVLYENQKLIANQFNSAIGKIQDSLSSTASALGKLQDVVNQNAQALNTLVKQLSSNFGAISSVLNDILSRLDPPEAEVQIDRLITGRLQSLQTYVTQQLIRAAEIRASANLAATKMSECVLGQSKRVDFCGKGYHLMSFPQSAPHGVVFLHVTYVPAQEKNFTTAPAICHDGKAHFPREGVFVSNGTHWFVTQRNFYEPQIITTDNTFVSGNCDVVIGIVNNTVYDPLQPELDSFKEELDKYFKNHTSPDVDLGDISGINASVVNIQKEIDRLNEVAKNLNESLIDLQELGKYEQYIKWPWYIWLGFIAGLIAIVMVTIMLCCMTSCCSCLKGCCSCGSCCKFDEDDSE

SEQ ID NO: 81 - DNA, 3840 bp, Artificial sequence
  Codon-optimized nucleotide sequence of the SF-2P-2a polypeptide of SARS-CoV-2
cgtacggccaccatgttcgtctttctggtattgcttcctctggtgagttcccagtgcgtgaacctgacgactcggacacagctgccgcctgcatacacaaacagcttcacacgaggtgtttactatccggacaaggtgttccggtcctctgtcttgcacagtactcaggacctttttctgccattctttagtaacgtaacatggttccacgctatccatgtaagtggaaccaatggcaccaagcgcttcgacaatccagtcctgcctttcaacgatggcgtctacttcgcctctaccgagaaatcaaatattattagagggtggatcttcgggaccacccttgatagcaagactcagagtcttctgatcgtgaacaatgctactaacgtcgtcataaaagtatgtgaatttcagttctgcaatgaccccttcctgggcgtgtactatcacaaaaataacaagtcctggatggaatccgagtttcgggtatacagcagcgctaataactgtaccttcgaatatgtgagccagccattcctgatggacctggaggggaagcagggcaacttcaaaaacctgagggaattcgtgttcaagaacattgacggatacttcaaaatctacagcaagcacactccaattaatcttgttagggaccttcctcaggggttctccgcgctggaacccttggtggatctgccaattggtattaacatcacgaggtttcaaaccctgctcgccctccaccggtcatacctgaccccaggtgatagtagtagtggctggacagcaggggccgcagcatactacgtcggctacctccagccccgcacattcctgctgaagtataatgaaaacggtactattacagatgctgtggactgcgcacttgatccattgtccgagactaaatgcaccttgaagtcttttaccgttgagaagggaatctatcagaccagtaatttcagagtgcaacccaccgagagcatcgtgcgatttcctaatattacaaacctgtgcccttttggcgaggtgtttaacgccactcgcttcgcgagcgtgtatgcatggaaccggaaaaggattagcaactgcgtggctgattattcagtcctttataatagtgcctctttcagtacgttcaaatgctatggagtgtccccaactaagcttaacgatctgtgttttaccaacgtgtatgccgactctttcgtcatcaggggcgacgaggttagacaaattgcgcccggacagacaggcaaaattgctgactacaattataaactgccagatgactttacaggatgcgtgattgcctggaacagcaacaaccttgattctaaggtgggcggaaactacaactatctgtacaggctgttccgcaaatcaaacctgaagccattcgaaagggacatttcaactgagatctaccaggccggatctacaccttgcaacggggtggaaggattcaactgctacttcccgctccagtcatatggctttcaacctaccaatggagtgggctaccaaccttatcgagtagttgttctctctttcgagttgttgcatgccccagccactgtctgcggaccaaagaaatccaccaatctggtgaaaaacaagtgcgtcaacttcaacttcaatggactcaccggtacaggggttcttaccgagtcaaacaagaaattccttccgtttcagcagtttggacgcgatatcgccgacactacggatgcagtacgcgatcctcagacacttgagatcctggacatcactccatgctcttttggaggggtgtctgtcatcactcccgggacgaataccagtaatcaggtcgccgtgctctatcaagatgtcaactgcacagaggtgccagtcgccattcacgccgatcagcttacccctacttggcgagtatatagcacagggtccaacgtgtttcagacaagggcgggttgtctgatcggcgctgagcacgtcaataatagctacgaatgtgacatccctattggagccgggatttgcgctagctatcagactcagactaactcaccccggcgagctaggtctgtagcaagtcagagtatcatagcctatactatgagcctgggggcagaaaattctgtcgcttatagtaataacagtattgcaattcctactaacttcactattagcgtgactacagaaattctgccagtgagcatgaccaagacctccgtcgactgtaccatgtatatctgcggagacagcacagaatgcagcaacctgcttctgcagtacggtagcttttgtacccagctgaacagggcactgaccggcatcgctgtggaacaggacaaaaatacgcaggaggtgttcgctcaggtcaagcagatttataagacacccccaataaaagacttcggcggctttaacttctcccagatcctgcccgatccgtcaaaaccttccaagagaagttttatcgaggatctgctgtttaacaaagtaacattggctgatgctggctttattaaacagtacggcgattgtctgggagatatcgccgctagagatctgatctgcgctcaaaaatttaatggcctcactgtattgccccccctgctgacggatgaaatgattgcccaatacacatcagccctgctggctgggacaatcacttccggctggacgttcggtgctggagctgctcttcaaattccatttgccatgcaaatggcttatagattcaacggaattggcgtgacccaaaacgtgctgtacgaaaatcaaaagctgattgctaatcagtttaactccgctatcggtaagatacaggacagcctgtctagtactgccagcgccctcggaaagctccaggatgtggtgaaccagaatgcgcaggcgctgaacacactcgtcaaacagcttagcagcaatttcggcgcaattagcagtgtactgaacgacatcttgtctcggctcgacccaccagaggccgaagtgcagattgatcgcctgatcactggccggctccagtctctgcagacctacgtaacccagcaactcatacgcgctgccgaaattcgggcttcagctaacctggccgcaacaaagatgtctgaatgtgttcttgggcagtccaagagggtggacttctgcgggaaaggatatcacctgatgtccttccctcagagcgcccctcatggagtggtgtttcttcatgttacctatgttccggcccaggaaaagaattttaccactgccccagccatttgccatgatggtaaagcacacttcccaagagagggcgtgtttgttagtaacggcacccactggttcgttacccagcgcaatttttacgaacctcaaatcattaccactgacaatacatttgtatcaggcaattgcgacgtggtgatcggaatcgtaaataatacagtctacgatcccctgcagccagagcttgacagctttaaagaggaactggacaaatacttcaaaaatcatacaagccccgacgtcgacctgggagatatttctggcatcaatgcctccgtcgtgaatatccaaaaagagatcgaccgccttaatgaggttgccaaaaacctcaacgagtccctgattgatctgcaggagctggggaagtacgagcagtatatcaaatggccctggtacatctggctgggcttcattgccgggctcatagccatcgtgatggtgacgatcatgctgtgttgcatgacctcttgctgttcttgtctgaaggggtgctgctcttgtgggagttgttgtaaattcgatgaggatgattccgaacctgtgctgaagggagtcgcgctcgcctatacgtaagcgcgc

SEQ ID NO: 82 - protein, 1273 aa, Artificial sequence
  SF-2P-2a polypeptide of SARS-CoV-2
MFVFLVLLPLVSSQCVNLTTRTQLPPAYTNSFTRGVYYPDKVFRSSVLHSTQDLFLPFFSNVTWFHAIHVSGTNGTKRFDNPVLPFNDGVYFASTEKSNIIRGWIFGTTLDSKTQSLLIVNNATNVVIKVCEFQFCNDPFLGVYYHKNNKSWMESEFRVYSSANNCTFEYVSQPFLMDLEGKQGNFKNLREFVFKNIDGYFKIYSKHTPINLVRDLPQGFSALEPLVDLPIGINITRFQTLLALHRSYLTPGDSSSGWTAGAAAYYVGYLQPRTFLLKYNENGTITDAVDCALDPLSETKCTLKSFTVEKGIYQTSNFRVQPTESIVRFPNITNLCPFGEVFNATRFASVYAWNRKRISNCVADYSVLYNSASFSTFKCYGVSPTKLNDLCFTNVYADSFVIRGDEVRQIAPGQTGKIADYNYKLPDDFTGCVIAWNSNNLDSKVGGNYNYLYRLFRKSNLKPFERDISTEIYQAGSTPCNGVEGFNCYFPLQSYGFQPTNGVGYQPYRVVVLSFELLHAPATVCGPKKSTNLVKNKCVNFNFNGLTGTGVLTESNKKFLPFQQFGRDIADTTDAVRDPQTLEILDITPCSFGGVSVITPGTNTSNQVAVLYQDVNCTEVPVAIHADQLTPTWRVYSTGSNVFQTRAGCLIGAEHVNNSYECDIPIGAGICASYQTQTNSPRRARSVASQSIIAYTMSLGAENSVAYSNNSIAIPTNFTISVTTEILPVSMTKTSVDCTMYICGDSTECSNLLLQYGSFCTQLNRALTGIAVEQDKNTQEVFAQVKQIYKTPPIKDFGGFNFSQILPDPSKPSKRSFIEDLLFNKVTLADAGFIKQYGDCLGDIAARDLICAQKFNGLTVLPPLLTDEMIAQYTSALLAGTITSGWTFGAGAALQIPFAMQMAYRFNGIGVTQNVLYENQKLIANQFNSAIGKIQDSLSSTASALGKLQDVVNQNAQALNTLVKQLSSNFGAISSVLNDILSRLDPPEAEVQIDRLITGRLQSLQTYVTQQLIRAAEIRASANLAATKMSECVLGQSKRVDFCGKGYHLMSFPQSAPHGVVFLHVTYVPAQEKNFTTAPAICHDGKAHFPREGVFVSNGTHWFVTQRNFYEPQIITTDNTFVSGNCDVVIGIVNNTVYDPLQPELDSFKEELDKYFKNHTSPDVDLGDISGINASVVNIQKEIDRLNEVAKNLNESLIDLQELGKYEQYIKWPWYIWLGFIAGLIAIVMVTIMLCCMTSCCSCLKGCCSCGSCCKFDEDDSEPVLKGVALAYT

SEQ ID NO: 83 - protein, 15 aa, Artificial sequence
  CD4 peptide (52-66)
QDLFLPFFSNVTWFH

SEQ ID NO: 84 - protein, 15 aa, Artificial sequence
  CD4 peptide (469-483)
STEIYQAGSTPCNGV

SEQ ID NO: 85 - protein, 15 aa, Artificial sequence
  CD4 peptide (512-526)
VLSFELLHAPATVCG

SEQ ID NO: 86 - protein, 15 aa, Artificial sequence
  CD4 peptide (702-716)
ENSVAYSNNSIAIPT

SEQ ID NO: 87 - protein, 15 aa, Artificial sequence
  CD4 peptide (882-896)
ITSGWTFGAGAALQI

SEQ ID NO: 88 - protein, 15 aa, Artificial sequence
  CD4 peptide (901-915)
QMAYRFNGIGVTQNV

SEQ ID NO: 89 - protein, 15 aa, Artificial sequence
  CD4 peptide (932-946)
GKIQDSLSSTASALG

SEQ ID NO: 90 - protein, 15 aa, Artificial sequence
  CD4 peptide (1013-1027)
IRAAEIRASANLAAT

SEQ ID NO: 91 - protein, 15 aa, Artificial sequence
  CD4 peptide (1046-1060)
GYHLMSFPQSAPHGV

SEQ ID NO: 92 - protein, 15 aa, Artificial sequence
  CD4 peptide (1069-1083)
PAQEKNFTTAPAICH

SEQ ID NO: 93 - protein, 9 aa, Artificial sequence
  CD8 peptide (2-10)
FVFLVLLPL

SEQ ID NO: 94 - protein, 9 aa, Artificial sequence
  CD8 peptide (16-24)
VNLTTRTQL

SEQ ID NO: 95 - protein, 9 aa, Artificial sequence
  CD8 peptide (54-62)
LFLPFFSNV

SEQ ID NO: 96 - protein, 9 aa, Artificial sequence
  CD8 peptide (60-68)
SNVTWFHAI

SEQ ID NO: 97 - protein, 9 aa, Artificial sequence
  CD8 peptide (62-70)
VTWFHAIHV

SEQ ID NO: 98 - protein, 9 aa, Artificial sequence
  CD8 peptide (102-110)
RGWIFGTTL

SEQ ID NO: 99 - protein, 9 aa, Artificial sequence
  CD8 peptide (133-141)
FQFCNDPFL

SEQ ID NO: 100 - protein, 9 aa, Artificial sequence
  CD8 peptide (160-168)
YSSANNCTF

SEQ ID NO: 101 - protein, 9 aa, Artificial sequence
  CD8 peptide (171-179)
VSQPFLMDL

SEQ ID NO: 102 - protein, 9 aa, Artificial sequence
  CD8 peptide (202-210)
KIYSKHTPI

SEQ ID NO: 103 - protein, 9 aa, Artificial sequence
  CD8 peptide (233-241)
INITRFQTL

SEQ ID NO: 104 - protein, 9 aa, Artificial sequence
  CD8 peptide (262-270)
AAAYYVGYL

SEQ ID NO: 105 - protein, 9 aa, Artificial sequence
  CD8 peptide (327-335)
VRFPNITNL

SEQ ID NO: 106 - protein, 9 aa, Artificial sequence
  CD8 peptide (342-350)
FNATRFASV

SEQ ID NO: 107 - protein, 9 aa, Artificial sequence
  CD8 peptide (447-455)
GNYNYLYRL

SEQ ID NO: 108 - protein, 9 aa, Artificial sequence
  CD8 peptide (503-511)
VGYQPYRVV

SEQ ID NO: 109 - protein, 9 aa, Artificial sequence
  CD8 peptide (510-518)
VVVLSFELL

SEQ ID NO: 110 - protein, 9 aa, Artificial sequence
  CD8 peptide (539-547)
VNFNFNGLT

SEQ ID NO: 111 - protein, 9 aa, Artificial sequence
  CD8 peptide (612-620)
YQDVNCTEV

SEQ ID NO: 112 - protein, 9 aa, Artificial sequence
  CD8 peptide (691-699)
SIIAYTMSL

SEQ ID NO: 113 - protein, 9 aa, Artificial sequence
  CD8 peptide (705-713)
VAYSNNSIA

SEQ ID NO: 114 - protein, 9 aa, Artificial sequence
  CD8 peptide (797-805)
FGGFNFSQI

SEQ ID NO: 115 - protein, 9 aa, Artificial sequence
  CD8 peptide (892-900)
AALQIPFAM

SEQ ID NO: 116 - protein, 9 aa, Artificial sequence
  CD8 peptide (951-959)
VVNQNAQAL

SEQ ID NO: 117 - protein, 9 aa, Artificial sequence
  CD8 peptide (1060-1068)
VVFLHVTYV

SEQ ID NO: 118 - protein, 9 aa, Artificial sequence
  CD8 peptide (1169-1177)
ISGINASVV

SEQ ID NO: 119 - protein, 9 aa, Artificial sequence
  CD8 peptide (1216-1224)
IWLGFIAGL

SEQ ID NO: 120 - protein, 9 aa, Artificial sequence
  CD8 peptide (1225-1233)
IAIVMVTIM

SEQ ID NO: 121 - DNA, 36 bp, Artificial sequence
  Construction primer BsiWI-Signal
taacgtacggccaccatgttcgtctttctggtattg

SEQ ID NO: 122 - DNA, 35 bp, Artificial sequence
  Construction primer BssHII-SF
taagcgcgcctattattcggaatcatcctcatcga

SEQ ID NO: 123 - DNA, 34 bp, Artificial sequence
  Construction primer BsmBI-signal
taacgtctccgcactgggaactcaccagaggaag

SEQ ID NO: 124 - DNA, 36 bp, Artificial sequence
  Construction primer BsmBI-S2
taacgtctcagtgcgtagcaagtcagagtatcatag

SEQ ID NO: 125 - DNA, 38 bp, Artificial sequence
  Construction primer BssHII-S2
taagcgcgcttattcggaatcatcctcatcgaatttac

SEQ ID NO: 126 - DNA, 42 bp, Artificial sequence
  Construction primer BsmBI-2P-fwd
aatcgtctcacaccagaggccgaagtgcagattgatcgcctg

SEQ ID NO: 127 - DNA, 40 bp, Artificial sequence
  Construction primer BsmBI-2P-rev
atacgtctcaggtgggtcgagccgagacaagatgtcgttc

SEQ ID NO: 128 - DNA, 22 bp, Artificial sequence
  Sequencing primer Signal-fwd1
tctggtattgcttcctctggtg

SEQ ID NO: 129 - DNA, 20 bp, Artificial sequence
  Sequencing primer SF-fwd2
tgcgcacttgatccattgtc

SEQ ID NO: 130 - DNA, 21 bp, Artificial sequence
  Sequencing primer S2-fwd3
gtaaagcacacttcccaagag

SEQ ID NO: 131 - DNA, 22 bp, Artificial sequence
  Sequencing primer SF-fwd4
gatcctggacatcactccatgc

SEQ ID NO: 132 - DNA, 23 bp, Artificial sequence
  Sequencing primer SF-rev1
ttccacttacatggatagcgtgg

SEQ ID NO: 133 - DNA, 24 bp, Artificial sequence
  Sequencing primer S2-rev1
tactgttattactataagcgacag

SEQ ID NO: 134 - DNA, 21 bp, Artificial sequence
  Sequencing primer S2-rev3
gatctctagcggcgatatctc

SEQ ID NO: 135 - DNA, 20 bp, Artificial sequence
  Sequencing primer 3433
gaccttgggaggcaatcact

SEQ ID NO: 136 - DNA, 20 bp, Artificial sequence
  Sequencing primer oligo8a
ggaatcgctgtcctcaacaa

SEQ ID NO: 137 - DNA, 24 bp, Artificial sequence
  Sequencing primer 9119
agatagggctgctagtgaaccaat

SEQ ID NO: 138 - DNA, 25 bp, Artificial sequence
  Sequencing primer 9218
tggaccctacgtttttcttaattct

SEQ ID NO: 139 - DNA, 19 bp, Artificial sequence
  qRT-PCR primer nCoV_IP4-14059Fw
ggtaactggtatgatttcg

SEQ ID NO: 140 - DNA, 20 bp, Artificial sequence
  qRT-PCR primer nCoV_IP4-14146Rv
ctggtcaaggttaatatagg

SEQ ID NO: 141 - DNA, 19 bp, Artificial Sequence
  qRT-PCR primer nCoV_IP4-14084Probe(+) - [5']Hex [3']BHQ-1 19
tcatacaaaccacgccagg

SEQ ID NO: 142 - protein, 29 aa, Artificial sequence
  Cytoplasmic tail from positions 1245 to 1273 of the native S protein of SARS-CoV-2
KGCCSCGSCCKFDEDDSEPVLKGVKLHYT

SEQ ID NO: 143 - protein, 18 aa, Artificial sequence
  dER polypeptide
KGCCSCGSCCKFDEDDSE

SEQ ID NO: 144 - DNA, 22796 bp, Artificial sequence
  pTM2-SF-dER_SARS-CoV-2 (optimized sequence)
tgtccgctaatacgactcactatagggccaactttgtttggtctgatgagtccgtgaggacgaaacccggagtcccgggtcaccaaacaaagttgggtaaggatagttcaatcaatgatcatcttctagtgcacttaggattcaagatcctattatcagggacaagagcaggattagggatatccgagatggccacacttttaaggagcttagcattgttcaaaagaaacaaggacaaaccacccattacatcaggatccggtggagccatcagaggaatcaaacacattattatagtaccaatccctggagattcctcaattaccactcgatccagacttctggaccggttggtgaggttaattggaaacccggatgtgagcgggcccaaactaacaggggcactaataggtatattatccttatttgtggagtctccaggtcaattgattcagaggatcaccgatgaccctgacgttagcataaggctgttagaggttgtccagagtgaccagtcacaatctggccttaccttcgcatcaagaggtaccaacatggaggatgaggcggaccaatacttttcacatgatgatccaattagtagtgatcaatccaggttcggatggttcgggaacaaggaaatctcagatattgaagtgcaagaccctgagggattcaacatgattctgggtaccatcctagcccaaatttgggtcttgctcgcaaaggcggttacggccccagacacggcagctgattcggagctaagaaggtggataaagtacacccaacaaagaagggtagttggtgaatttagattggagagaaaatggttggatgtggtgaggaacaggattgccgaggacctctccttacgccgattcatggtcgctctaatcctggatatcaagagaacacccggaaacaaacccaggattgctgaaatgatatgtgacattgatacatatatcgtagaggcaggattagccagttttatcctgactattaagtttgggatagaaactatgtatcctgctcttggactgcatgaatttgctggtgagttatccacacttgagtccttgatgaacctttaccagcaaatgggggaaactgcaccctacatggtaatcctggagaactcaattcagaacaagttcagtgcaggatcataccctctgctctggagctatgccatgggagtaggagtggaacttgaaaactccatgggaggtttgaactttggccgatcttactttgatccagcatattttagattagggcaagagatggtaaggaggtcagctggaaaggtcagttccacattggcatctgaactcggtatcactgccgaggatgcaaggcttgtttcagagattgcaatgcatactactgaggacaagatcagtagagcggttggacccagacaagcccaagtatcatttctacacggtgatcaaagtgagaatgagctaccgagattggggggcaaggaagataggagggtcaaacagagtcgaggagaagccagggagagctacagagaaaccgggcccagcagagcaagtgatgcgagagctgcccatcttccaaccggcacacccctagacattgacactgcaacggagtccagccaagatccgcaggacagtcgaaggtcagctgacgccctgcttaggctgcaagccatggcaggaatctcggaagaacaaggctcagacacggacacccctatagtgtacaatgacagaaatcttctagactaggtgcgagaggccgagggccagaacaacatccgcctaccatccatcattgttataaaaaacttaggaaccaggtccacacagccgccagcccatcaaccatccactcccacgattggagccaatggcagaagagcaggcacgccatgtcaaaaacggactggaatgcatccgggctctcaaggccgagcccatcggctcactggccatcgaggaagctatggcagcatggtcagaaatatcagacaacccaggacaggagcgagccacctgcagggaagagaaggcaggcagttcgggtctcagcaaaccatgcctctcagcaattggatcaactgaaggcggtgcacctcgcatccgcggtcagggacctggagagagcgatgacgacgctgaaactttgggaatccccccaagaaatctccaggcatcaagcactgggttacagtgttattacgtttatgatcacagcggtgaagcggttaagggaatccaagatgctgactctatcatggttcaatcaggccttgatggtgatagcaccctctcaggaggagacaatgaatctgaaaacagcgatgtggatattggcgaacctgataccgagggatatgctatcactgaccggggatctgctcccatctctatggggttcagggcttctgatgttgaaactgcagaaggaggggagatccacgagctcctgagactccaatccagaggcaacaactttccgaagcttgggaaaactctcaatgttcctccgcccccggaccccggtagggccagcacttccgggacacccattaaaaagggcacagacgcgagattagcctcatttggaacggagatcgcgtctttattgacaggtggtgcaacccaatgtgctcgaaagtcaccctcggaaccatcagggccaggtgcacctgcggggaatgtccccgagtgtgtgagcaatgccgcactgatacaggagtggacacccgaatctggtaccacaatctccccgagatcccagaataatgaagaagggggagactattatgatgatgagctgttctctgatgtccaagatattaaaacagccttggccaaaatacacgaggataatcagaagataatctccaagctagaatcactgctgttattgaagggagaagttgagtcaattaagaagcagatcaacaggcaaaatatcagcatatccaccctggaaggacacctctcaagcatcatgatcgccattcctggacttgggaaggatcccaacgaccccactgcagatgtcgaaatcaatcccgacttgaaacccatcataggcagagattcaggccgagcactggccgaagttctcaagaaacccgttgccagccgacaactccaaggaatgacaaatggacggaccagttccagaggacagctgctgaaggaatttcagctaaagccgatcgggaaaaagatgagctcagccgtcgggtttgttcctgacaccggccctgcatcacgcagtgtaatccgctccattataaaatccagccggctagaggaggatcggaagcgttacctgatgactctccttgatgatatcaaaggagccaatgatcttgccaagttccaccagatgctgatgaagataataatgaagtagctacagctcaacttacctgccaaccccatgccagtcgacccaactagcctaccctccatcattgttataaaaaacttaggaaccaggtccacacagccgccagcccatcaacgcgtacggccaccatgttcgtctttctggtattgcttcctctggtgagttcccagtgcgtgaacctgacgactcggacacagctgccgcctgcatacacaaacagcttcacacgaggtgtttactatccggacaaggtgttccggtcctctgtcttgcacagtactcaggacctttttctgccattctttagtaacgtaacatggttccacgctatccatgtaagtggaaccaatggcaccaagcgcttcgacaatccagtcctgcctttcaacgatggcgtctacttcgcctctaccgagaaatcaaatattattagagggtggatcttcgggaccacccttgatagcaagactcagagtcttctgatcgtgaacaatgctactaacgtcgtcataaaagtatgtgaatttcagttctgcaatgaccccttcctgggcgtgtactatcacaaaaataacaagtcctggatggaatccgagtttcgggtatacagcagcgctaataactgtaccttcgaatatgtgagccagccattcctgatggacctggaggggaagcagggcaacttcaaaaacctgagggaattcgtgttcaagaacattgacggatacttcaaaatctacagcaagcacactccaattaatcttgttagggaccttcctcaggggttctccgcgctggaacccttggtggatctgccaattggtattaacatcacgaggtttcaaaccctgctcgccctccaccggtcatacctgaccccaggtgatagtagtagtggctggacagcaggggccgcagcatactacgtcggctacctccagccccgcacattcctgctgaagtataatgaaaacggtactattacagatgctgtggactgcgcacttgatccattgtccgagactaaatgcaccttgaagtcttttaccgttgagaagggaatctatcagaccagtaatttcagagtgcaacccaccgagagcatcgtgcgatttcctaatattacaaacctgtgcccttttggcgaggtgtttaacgccactcgcttcgcgagcgtgtatgcatggaaccggaaaaggattagcaactgcgtggctgattattcagtcctttataatagtgcctctttcagtacgttcaaatgctatggagtgtccccaactaagcttaacgatctgtgttttaccaacgtgtatgccgactctttcgtcatcaggggcgacgaggttagacaaattgcgcccggacagacaggcaaaattgctgactacaattataaactgccagatgactttacaggatgcgtgattgcctggaacagcaacaaccttgattctaaggtgggcggaaactacaactatctgtacaggctgttccgcaaatcaaacctgaagccattcgaaagggacatttcaactgagatctaccaggccggatctacaccttgcaacggggtggaaggattcaactgctacttcccgctccagtcatatggctttcaacctaccaatggagtgggctaccaaccttatcgagtagttgttctctctttcgagttgttgcatgccccagccactgtctgcggaccaaagaaatccaccaatctggtgaaaaacaagtgcgtcaacttcaacttcaatggactcaccggtacaggggttcttaccgagtcaaacaagaaattccttccgtttcagcagtttggacgcgatatcgccgacactacggatgcagtacgcgatcctcagacacttgagatcctggacatcactccatgctcttttggaggggtgtctgtcatcactcccgggacgaataccagtaatcaggtcgccgtgctctatcaagatgtcaactgcacagaggtgccagtcgccattcacgccgatcagcttacccctacttggcgagtatatagcacagggtccaacgtgtttcagacaagggcgggttgtctgatcggcgctgagcacgtcaataatagctacgaatgtgacatccctattggagccgggatttgcgctagctatcagactcagactaactcaccccggcgagctaggtctgtagcaagtcagagtatcatagcctatactatgagcctgggggcagaaaattctgtcgcttatagtaataacagtattgcaattcctactaacttcactattagcgtgactacagaaattctgccagtgagcatgaccaagacctccgtcgactgtaccatgtatatctgcggagacagcacagaatgcagcaacctgcttctgcagtacggtagcttttgtacccagctgaacagggcactgaccggcatcgctgtggaacaggacaaaaatacgcaggaggtgttcgctcaggtcaagcagatttataagacacccccaataaaagacttcggcggctttaacttctcccagatcctgcccgatccgtcaaaaccttccaagagaagttttatcgaggatctgctgtttaacaaagtaacattggctgatgctggctttattaaacagtacggcgattgtctgggagatatcgccgctagagatctgatctgcgctcaaaaatttaatggcctcactgtattgccccccctgctgacggatgaaatgattgcccaatacacatcagccctgctggctgggacaatcacttccggctggacgttcggtgctggagctgctcttcaaattccatttgccatgcaaatggcttatagattcaacggaattggcgtgacccaaaacgtgctgtacgaaaatcaaaagctgattgctaatcagtttaactccgctatcggtaagatacaggacagcctgtctagtactgccagcgccctcggaaagctccaggatgtggtgaaccagaatgcgcaggcgctgaacacactcgtcaaacagcttagcagcaatttcggcgcaattagcagtgtactgaacgacatcttgtctcggctcgacaaggtcgaggccgaagtgcagattgatcgcctgatcactggccggctccagtctctgcagacctacgtaacccagcaactcatacgcgctgccgaaattcgggcttcagctaacctggccgcaacaaagatgtctgaatgtgttcttgggcagtccaagagggtggacttctgcgggaaaggatatcacctgatgtccttccctcagagcgcccctcatggagtggtgtttcttcatgttacctatgttccggcccaggaaaagaattttaccactgccccagccatttgccatgatggtaaagcacacttcccaagagagggcgtgtttgttagtaacggcacccactggttcgttacccagcgcaatttttacgaacctcaaatcattaccactgacaatacatttgtatcaggcaattgcgacgtggtgatcggaatcgtaaataatacagtctacgatcccctgcagccagagcttgacagctttaaagaggaactggacaaatacttcaaaaatcatacaagccccgacgtcgacctgggagatatttctggcatcaatgcctccgtcgtgaatatccaaaaagagatcgaccgccttaatgaggttgccaaaaacctcaacgagtccctgattgatctgcaggagctggggaagtacgagcagtatatcaaatggccctggtacatctggctgggcttcattgccgggctcatagccatcgtgatggtgacgatcatgctgtgttgcatgacctcttgctgttcttgtctgaaggggtgctgctcttgtgggagttgttgtaaattcgatgaggatgattccgaataataggcgcgcagcgcttagacgtctcgcgatcgatactagtacaacctaaatccattataaaaaacttaggagcaaagtgattgcctcccaaggtccacaatgacagagacctacgacttcgacaagtcggcatgggacatcaaagggtcgatcgctccgatacaacccaccacctacagtgatggcaggctggtgccccaggtcagagtcatagatcctggtctaggcgacaggaaggatgaatgctttatgtacatgtttctgctgggggttgttgaggacagcgattccctagggcctccaatcgggcgagcatttgggttcctgcccttaggtgttggcagatccacagcaaagcccgaaaaactcctcaaagaggccactgagcttgacatagttgttagacgtacagcagggctcaatgaaaaactggtgttctacaacaacaccccactaactctcctcacaccttggagaaaggtcctaacaacagggagtgtcttcaacgcaaaccaagtgtgcaatgcggttaatctgataccgctcgataccccgcagaggttccgtgttgtttatatgagcatcacccgtctttcggataacgggtattacaccgttcctagaagaatgctggaattcagatcggtcaatgcagtggccttcaacctgctggtgacccttaggattgacaaggcgataggccctgggaagatcatcgacaatacagagcaacttcctgaggcaacatttatggtccacatcgggaacttcaggagaaagaagagtgaagtctactctgccgattattgcaaaatgaaaatcgaaaagatgggcctggtttttgcacttggtgggatagggggcaccagtcttcacattagaagcacaggcaaaatgagcaagactctccatgcacaactcgggttcaagaagaccttatgttacccgctgatggatatcaatgaagaccttaatcgattactctggaggagcagatgcaagatagtaagaatccaggcagttttgcagccatcagttcctcaagaattccgcatttacgacgacgtgatcataaatgatgaccaaggactattcaaagttctgtagaccgtagtgcccagcaatgcccgaaaacgacccccctcacaatgacagccagaaggcccggacaaaaaagccccctccgaaagactccacggaccaagcgagaggccagccagcagccgacggcaagcgcgaacaccaggcggccccagcacagaacagccctgacacaaggccaccaccagccaccccaatctgcatcctcctcgtgggacccccgaggaccaacccccaaggctgcccccgatccaaaccaccaaccgcatccccaccacccccgggaaagaaacccccagcaattggaaggcccctccccctcttcctcaacacaagaactccacaaccgaaccgcacaagcgaccgaggtgacccaaccgcaggcatccgactccctagacagatcctctctccccggcaaactaaacaaaacttagggccaaggaacatacacacccaacagaacccagaccccggcccacggcgccgcgcccccaacccccgacaaccagagggagcccccaaccaatcccgccggctcccccggtgcccacaggcagggacaccaacccccgaacagacccagcacccaaccatcgacaatccaagacgggggggcccccccaaaaaaaggcccccaggggccgacagccagcaccgcgaggaagcccacccaccccacacacgaccacggcaaccaaaccagaacccagaccaccctgggccaccagctcccagactcggccatcaccccgcagaaaggaaaggccacaacccgcgcaccccagccccgatccggcggggagccacccaacccgaaccagcacccaagagcgatccccgaaggacccccgaaccgcaaaggacatcagtatcccacagcctctccaagtcccccggtctcctcctcttctcgaagggaccaaaagatcaatccaccacacccgacgacactcaactccccacccctaaaggagacaccgggaatcccagaatcaagactcatccaatgtccatcatgggtctcaaggtgaacgtctctgccatattcatggcagtactgttaactctccaaacacccaccggtcaaatccattggggcaatctctctaagataggggtggtaggaataggaagtgcaagctacaaagttatgactcgttccagccatcaatcattagtcataaaattaatgcccaatataactctcctcaataactgcacgagggtagagattgcagaatacaggagactactgagaacagttttggaaccaattagagatgcacttaatgcaatgacccagaatataagaccggttcagagtgtagcttcaagtaggagacacaagagatttgcgggagtagtcctggcaggtgcggccctaggcgttgccacagctgctcagataacagccggcattgcacttcaccagtccatgctgaactctcaagccatcgacaatctgagagcgagcctggaaactactaatcaggcaattgagacaatcagacaagcagggcaggagatgatattggctgttcagggtgtccaagactacatcaataatgagctgataccgtctatgaaccaactatcttgtgatttaatcggccagaagctcgggctcaaattgctcagatactatacagaaatcctgtcattatttggccccagtttacgggaccccatatctgcggagatatctatccaggctttgagctatgcgcttggaggagacatcaataaggtgttagaaaagctcggatacagtggaggtgatttactgggcatcttagagagcggaggaataaaggcccggataactcacgtcgacacagagtcctacttcattgtcctcagtatagcctatccgacgctgtccgagattaagggggtgattgtccaccggctagagggggtctcgtacaacataggctctcaagagtggtataccactgtgcccaagtatgttgcaacccaagggtaccttatctcgaattttgatgagtcatcgtgtactttcatgccagaggggactgtgtgcagccaaaatgccttgtacccgatgagtcctctgctccaagaatgcctccgggggtacaccaagtcctgtgctcgtacactcgtatccgggtcttttgggaaccggttcattttatcacaagggaacctaatagccaattgtgcatcaatcctttgcaagtgttacacaacaggaacgatcattaatcaagaccctgacaagatcctaacatacattgctgccgatcactgcccggtagtcgaggtgaacggcgtgaccatccaagtcgggagcaggaggtatccagacgctgtgtacttgcacagaattgacctcggtcctcccatatcattggagaggttggacgtagggacaaatctggggaatgcaattgctaagttggaggatgccaaggaattgttggagtcatcggaccagatattgaggagtatgaaaggtttatcgagcactagcatagtctacatcctgattgcagtgtgtcttggagggttgatagggatccccgctttaatatgttgctgcagggggcgttgtaacaaaaagggagaacaagttggtatgtcaagaccaggcctaaagcctgatcttacgggaacatcaaaatcctatgtaaggtcgctctgatcctctacaactcttgaaacacaaatgtcccacaagtctcctcttcgtcatcaagcaaccaccgcacccagcatcaagcccacctgaaattatctccggcttccctctggccgaacaatatcggtagttaatcaaaacttagggtgcaagatcatccacaatgtcaccacaacgagaccggataaatgccttctacaaagataacccccatcccaagggaagtaggatagtcattaacagagaacatcttatgattgatagaccttatgttttgctggctgttctgtttgtcatgtttctgagcttgatcgggttgctagccattgcaggcattagacttcatcgggcagccatctacaccgcagagatccataaaagcctcagcaccaatctagatgtaactaactcaatcgagcatcaggtcaaggacgtgctgacaccactcttcaaaatcatcggtgatgaagtgggcctgaggacacctcagagattcactgacctagtgaaattaatctctgacaagattaaattccttaatccggatagggagtacgacttcagagatctcacttggtgtatcaacccgccagagagaatcaaattggattatgatcaatactgtgcagatgtggctgctgaagagctcatgaatgcattggtgaactcaactctactggagaccagaacaaccaatcagttcctagctgtctcaaagggaaactgctcagggcccactacaatcagaggtcaattctcaaacatgtcgctgtccctgttagacttgtatttaggtcgaggttacaatgtgtcatctatagtcactatgacatcccagggaatgtatgggggaacttacctagtggaaaagcctaatctgagcagcaaaaggtcagagttgtcacaactgagcatgtaccgagtgtttgaagtaggtgttatcagaaatccgggtttgggggctccggtgttccatatgacaaactatcttgagcaaccagtcagtaatgatctcagcaactgtatggtggctttgggggagctcaaactcgcagccctttgtcacggggaagattctatcacaattccctatcagggatcagggaaaggtgtcagcttccagctcgtcaagctaggtgtctggaaatccccaaccgacatgcaatcctgggtccccttatcaacggatgatccagtgatagacaggctttacctctcatctcacagaggtgttatcgctgacaatcaagcaaaatgggctgtcccgacaacacgaacagatgacaagttgcgaatggagacatgcttccaacaggcgtgtaagggtaaaatccaagcactctgcgagaatcccgagtgggcaccattgaaggataacaggattccttcatacggggtcttgtctgttgatctgagtctgacagttgagcttaaaatcaaaattgcttcgggattcgggccattgatcacacacggttcagggatggacctatacaaatccaaccacaacaatgtgtattggctgactatcccgccaatgaagaacctagccttaggtgtaatcaacacattggagtggataccgagattcaaggttagtccctacctcttcactgtcccaattaaggaagcaggcgaagactgccatgccccaacatacctacctgcggaggtggatggtgatgtcaaactcagttccaatctggtgattctacctggtcaagatctccaatatgttttggcaacctacgatacttccagggttgaacatgctgtggtttattacgtttacagcccaagccgctcattttcttacttttatccttttaggttgcctataaagggggtccccatcgaattacaagtggaatgcttcacatgggaccaaaaactctggtgccgtcacttctgtgtgcttgcggactcagaatctggtggacatatcactcactctgggatggtgggcatgggagtcagctgcacagtcacccgggaagatggaaccaatcgcagatagggctgctagtgaaccaatcacatgatgtcacccagacatcaggcatacccactagtgtgaaatagacatcagaattaagaaaaacgtagggtccaagtggttccccgttatggactcgctatctgtcaaccagatcttataccctgaagttcacctagatagcccgatagttaccaataagatagtagccatcctggagtatgctcgagtccctcacgcttacagcctggaggaccctacactgtgtcagaacatcaagcaccgcctaaaaaacggattttccaaccaaatgattataaacaatgtggaagttgggaatgtcatcaagtccaagcttaggagttatccggcccactctcatattccatatccaaattgtaatcaggatttatttaacatagaagacaaagagtcaacgaggaagatccgtgaactcctcaaaaaggggaattcgctgtactccaaagtcagtgataaggttttccaatgcttaagggacactaactcacggcttggcctaggctccgaattgagggaggacatcaaggagaaagttattaacttgggagtttacatgcacagctcccagtggtttgagccctttctgttttggtttacagtcaagactgagatgaggtcagtgattaaatcacaaacccatacttgccataggaggagacacacacctgtattcttcactggtagttcagttgagttgctaatctctcgtgaccttgttgctataatcagtaaagagtctcaacatgtatattacctgacatttgaactggttttgatgtattgtgatgtcatagaggggaggttaatgacagagaccgctatgactattgatgctaggtatacagagcttctaggaagagtcagatacatgtggaaactgatagatggtttcttccctgcactcgggaatccaacttatcaaattgtagccatgctggagcctctttcacttgcttacctgcagctgagggatataacagtagaactcagaggtgctttccttaaccactgctttactgaaatacatgatgttcttgaccaaaacgggttttctgatgaaggtacttatcatgagttaactgaagctctagattacattttcataactgatgacatacatctgacaggggagattttctcatttttcagaagtttcggccaccccagacttgaagcagtaacggctgctgaaaatgttaggaaatacatgaatcagcctaaagtcattgtgtatgagactctgatgaaaggtcatgccatattttgtggaatcataatcaacggctatcgtgacaggcacggaggcagttggccaccgctgaccctccccctgcatgctgcagacacaatccggaatgctcaagcttcaggtgaagggttaacacatgagcagtgcgttgataactggaaatcttttgctggagtgaaatttggctgctttatgcctcttagcctggatagtgatctgacaatgtacctaaaggacaaggcacttgctgctctccaaagggaatgggattcagtttacccgaaagagttcctgcgttacgaccctcccaagggaaccgggtcacggaggcttgtagatgttttccttaatgattcgagctttgacccatatgatgtgataatgtatgttgtaagtggagcttacctccatgaccctgagttcaacctgtcttacagcctgaaagaaaaggagatcaaggaaacaggtagactttttgctaaaatgacttacaaaatgagggcatgccaagtgattgctgaaaatctaatctcaaacgggattggcaaatattttaaggacaatgggatggccaaggatgagcacgatttgactaaggcactccacactctagctgtctcaggagtccccaaagatctcaaagaaagtcacaggggggggccagtcttaaaaacctactcccgaagcccagtccacacaagtaccaggaacgtgagagcagcaaaagggtttatagggttccctcaagtaattcggcaggaccaagacactgatcatccggagaatatggaagcttacgagacagtcagtgcatttatcacgactgatctcaagaagtactgccttaattggagatatgagaccatcagcttgtttgcacagaggctaaatgagatttacggattgccctcatttttccagtggctgcataagaggcttgagacctctgtcctgtatgtaagtgaccctcattgcccccccgaccttgacgcccatatcccgttatataaagtccccaatgatcaaatcttcattaagtaccctatgggaggtatagaagggtattgtcagaagctgtggaccatcagcaccattccctatctatacctggctgcttatgagagcggagtaaggattgcttcgttagtgcaaggggacaatcagaccatagccgtaacaaaaagggtacccagcacatggccctacaaccttaagaaacgggaagctgctagagtaactagagattactttgtaattcttaggcaaaggctacatgatattggccatcacctcaaggcaaatgagacaattgtttcatcacatttttttgtctattcaaaaggaatatattatgatgggctacttgtgtcccaatcactcaagagcatcgcaagatgtgtattctggtcagagactatagttgatgaaacaagggcagcatgcagtaatattgctacaacaatggctaaaagcatcgagagaggttatgaccgttaccttgcatattccctgaacgtcctaaaagtgatacagcaaattctgatctctcttggcttcacaatcaattcaaccatgacccgggatgtagtcatacccctcctcacaaacaacgacctcttaataaggatggcactgttgcccgctcctattggggggatgaattatctgaatatgagcaggctgtttgtcagaaacatcggtgatccagtaacatcatcaattgctgatctcaagagaatgattctcgcctcactaatgcctgaagagaccctccatcaagtaatgacacaacaaccgggggactcttcattcctagactgggctagcgacccttactcagcaaatcttgtatgtgtccagagcatcactagactcctcaagaacataactgcaaggtttgtcctgatccatagtccaaacccaatgttaaaaggattattccatgatgacagtaaagaagaggacgagggactggcggcattcctcatggacaggcatattatagtacctagggcagctcatgaaatcctggatcatagtgtcacaggggcaagagagtctattgcaggcatgctggataccacaaaaggcttgattcgagccagcatgaggaagggggggttaacctctcgagtgataaccagattgtccaattatgactatgaacaattcagagcagggatggtgctattgacaggaagaaagagaaatgtcctcattgacaaagagtcatgttcagtgcagctggcgagagctctaagaagccatatgtgggcgaggctagctcgaggacggcctatttacggccttgaggtccctgatgtactagaatctatgcgaggccaccttattcggcgtcatgagacatgtgtcatctgcgagtgtggatcagtcaactacggatggttttttgtcccctcgggttgccaactggatgatattgacaaggaaacatcatccttgagagtcccatatattggttctaccactgatgagagaacagacatgaagcttgccttcgtaagagccccaagtcgatccttgcgatctgctgttagaatagcaacagtgtactcatgggcttacggtgatgatgatagctcttggaacgaagcctggttgttggctaggcaaagggccaatgtgagcctggaggagctaagggtgatcactcccatctcaacttcgactaatttagcgcataggttgagggatcgtagcactcaagtgaaatactcaggtacatcccttgtccgagtggcgaggtataccacaatctccaacgacaatctctcatttgtcatatcagataagaaggttgatactaactttatataccaacaaggaatgcttctagggttgggtgttttagaaacattgtttcgactcgagaaagataccggatcatctaacacggtattacatcttcacgtcgaaacagattgttgcgtgatcccgatgatagatcatcccaggatacccagctcccgcaagctagagctgagggcagagctatgtaccaacccattgatatatgataatgcacctttaattgacagagatgcaacaaggctatacacccagagccataggaggcaccttgtggaatttgttacatggtccacaccccaactatatcacattttagctaagtccacagcactatctatgattgacctggtaacaaaatttgagaaggaccatatgaatgaaatttcagctctcataggggatgacgatatcaatagtttcataactgagtttctgctcatagagccaagattattcactatctacttgggccagtgtgcggccatcaattgggcatttgatgtacattatcatagaccatcagggaaatatcagatgggtgagctgttgtcatcgttcctttctagaatgagcaaaggagtgtttaaggtgcttgtcaatgctctaagccacccaaagatctacaagaaattctggcattgtggtattatagagcctatccatggtccttcacttgatgctcaaaacttgcacacaactgtgtgcaacatggtttacacatgctatatgacctacctcgacctgttgttgaatgaagagttagaagagttcacatttctcttgtgtgaaagcgacgaggatgtagtaccggacagattcgacaacatccaggcaaaacacttatgtgttctggcagatttgtactgtcaaccagggacctgcccaccaattcgaggtctaagaccggtagagaaatgtgcagttctaaccgaccatatcaaggcagaggctatgttatctccagcaggatcttcgtggaacataaatccaattattgtagaccattactcatgctctctgacttatctccggcgaggatcgatcaaacagataagattgagagttgatccaggattcattttcgacgccctcgctgaggtaaatgtcagtcagccaaagatcggcagcaacaacatctcaaatatgagcatcaaggctttcagacccccacacgatgatgttgcaaaattgctcaaagatatcaacacaagcaagcacaatcttcccatttcagggggcaatctcgccaattatgaaatccatgctttccgcagaatcgggttgaactcatctgcttgctacaaagctgttgagatatcaacattaattaggagatgccttgagccaggggaggacggcttgttcttgggtgagggatcgggttctatgttgatcacttataaagagatacttaaactaaacaagtgcttctataatagtggggtttccgccaattctagatctggtcaaagggaattagcaccctatccctccgaagttggccttgtcgaacacagaatgggagtaggtaatattgtcaaagtgctctttaacgggaggcccgaagtcacgtgggtaggcagtgtagattgcttcaatttcatagttagtaatatccctacctctagtgtggggtttatccattcagatatagagaccttgcctgacaaagatactatagagaagctagaggaattggcagccatcttatcgatggctctgctcctgggcaaaataggatcaatactggtgattaagcttatgcctttcagcggggattttgttcagggatttataagttatgtagggtctcattatagagaagtgaaccttgtataccctagatacagcaacttcatctctactgaatcttatttggttatgacagatctcaaggctaaccggctaatgaatcctgaaaagattaagcagcagataattgaatcatctgtgaggacttcacctggacttataggtcacatcctatccattaagcaactaagctgcatacaagcaattgtgggagacgcagttagtagaggtgatatcaatcctactctgaaaaaacttacacctatagagcaggtgctgatcaattgcgggttggcaattaacggacctaagctgtgcaaagaattgatccaccatgatgttgcctcagggcaagatggattgcttaattctatactcatcctctacagggagttggcaagattcaaagacaaccaaagaagtcaacaagggatgttccacgcttaccccgtattggtaagtagcaggcaacgagaacttatatctaggatcacccgcaaattctgggggcacattcttctttactccgggaacaaaaagttgataaataagtttatccagaatctcaagtccggctatctgatactagacttacaccagaatatcttcgttaagaatctatccaagtcagagaaacagattattatgacggggggtttgaaacgtgagtgggtttttaaggtaacagtcaaggagaccaaagaatggtataagttagtcggatacagtgccctgattaaggactaattggttgaactccggaaccctaatcctgccctaggtggttaggcattatttgcaatatattaaagaaaactttgaaaatacgaagtttctattcccagctttgtctggtggccggcatggtcccagcctcctcgctggcgccggctgggcaacattccgaggggaccgtcccctcggtaatggcgaatgggacgcggccgatccggctgctaacaaagcccgaaaggaagctgagttggctgctgccaccgctgagcaataactagcataaccccttggggcctctaaacgggtcttgaggggttttttgctgaaaggaggaactatatccggatgcggccgcgggccctatggtacccagcttttgttccctttagtgagggttaattccgagcttggcgtaatcatggtcatagctgtttcctgtgtgaaattgttatccgctcacaattccacacaacataggagccggaagcataaagtgtaaagcctggggtgcctaatgagtgaggtaactcacattaattgcgttgcgctcactgcccgctttccagtcgggaaacctgtcgtgccagctgcattaatgaatcggccaacgcgcggggagaggcggtttgcgtattgggcgctcttccgcttcctcgctcactgactcgctgcgctcggtcgttcggctgcggcgagcggtatcagctcactcaaaggcggtaatacggttatccacagaatcaggggataacgcaggaaagaacatgtgagcaaaaggccagcaaaaggccaggaaccgtaaaaaggccgcgttgctggcgtttttccataggctcggcccccctgacgagcatcacaaaaatcgacgctcaagtcagaggtggcgaaacccgacaggactataaagataccaggcgttcccccctggaagctccctcgtgcgctctcctgttccgaccctgccgcttaccggatacctgtccgcctttctcccttcgggaagcgtggcgctttctcaatgctcacgctgtaggtatctcagttcggtgtaggtcgttcgctccaagctgggctgtgtgcacgaaccccccgttcagcccgaccgctgcgccttatccggtaactatcgtcttgagtccaacccggtaagacacgacttatcgccactggcagcagccactggtaacaggattagcagagcgaggtatgtaggcggtgctacagagttcttgaagtggtggcctaactacggctacactagaaggacagtatttggtatctgcgctctgctgaagccagttaccttcggaaaaagagttggtagctcttgatccggcaaacaaaccaccgctggtagcggtggtttttttgtttgcaagcagcagattacgcgcagaaaaaaaggatctcaagaagatcctttgatcttttctacggggtctgacgctcagtggaacgaaaactcacgttaagggattttggtcatgagattatcaaaaaggatcttcacctagatccttttaaattaaaaatgaagttttaaatcaatctaaagtatatatgagtaaacttggtctgacagttaccaatgcttaatcagtgaggcacctatctcagcgatctgtctatttcgttcatccatagttgcctgactgcccgtcgtgtagataactacgatacgggagggcttaccatctggccccagtgctgcaatgataccgcgagacccacgctcaccggctccagatttatcagcaataaaccagccagccggaagggccgagcgcagaagtggtcctgcaactttatccgcctccatccagtctattaattgttgccgggaagctagagtaagtagttcgccagttaatagtttgcgcaacgttgttgccattgctacaggcatcgtggtgtcacgctcgtcgtttggtatggcttcattcagctccggttcccaacgatcaaggcgagttacatgatcccccatgttgtgaaaaaaagcggttagctccttcggtcctccgatcgttgtcagaagtaagttggccgcagtgttatcactcatgcttatggcagcactgcataattctcttactgtcatgccatccgtaagatgcttttctgtgactggtgagtactcaaccaagtcattctgagaatagtgtatgcggcgaccgagttgctcttgcccggcgtcaatacgggataataccgcgccacatagcagaactttaaaagtgctcatcattggaaaacgttcttcggggcgaaaactctcaaggatcttaccgctgttgagatccagttcgatgtaacccactcgtgcacccaactgatcttcagcatcttttactttcaccagcgtttctgggtgagcaaaaacaggaaggcaaaatgccgcaaaaaagggaataagggcgacacggaaatgttgaatactcatactcttcctttttcaatattattgaagcatttatcagggttattgtctcatgagcggatacatatttgaatgtatttagaaaaataaacaaataggggttccgcgcacatttccccgaaaagtgccacctgaaattgtaaacgttaatattttgttaaaattcgcgttaaatttttgttaaatcagctcattttttaaccaataggccgaaatcggcaaaatcccttataaatcaaaagaatagaccgagatagggttgagtgttgttccagtttggaacaagagtccactattaaagaacgtggactccaacgtcaaagggcgaaaaaccgtctatcagggcgatggcccactacgtgaaccatcaccctaatcaagttttttggggtcgaggtgccgtaaagcactaaatcggaaccctaaagggagcccccgatttagagcttgacggggaaagccggcgaacgtggcgagaaaggaagggaagaaagcgaaaggagcgggcgctagggcgctggcaagtgtagcggtcacgctgcgcgtaaccaccacacccgccgcgcttaatgcgccgctacagggcgcgtcccatt

SEQ ID NO: 145 - DNA, 20780 bp, Artificial sequence
  pTM2-S2-dER_SARS-CoV-2 (optimized sequence)
tgtccgctaatacgactcactatagggccaactttgtttggtctgatgagtccgtgaggacgaaacccggagtcccgggtcaccaaacaaagttgggtaaggatagttcaatcaatgatcatcttctagtgcacttaggattcaagatcctattatcagggacaagagcaggattagggatatccgagatggccacacttttaaggagcttagcattgttcaaaagaaacaaggacaaaccacccattacatcaggatccggtggagccatcagaggaatcaaacacattattatagtaccaatccctggagattcctcaattaccactcgatccagacttctggaccggttggtgaggttaattggaaacccggatgtgagcgggcccaaactaacaggggcactaataggtatattatccttatttgtggagtctccaggtcaattgattcagaggatcaccgatgaccctgacgttagcataaggctgttagaggttgtccagagtgaccagtcacaatctggccttaccttcgcatcaagaggtaccaacatggaggatgaggcggaccaatacttttcacatgatgatccaattagtagtgatcaatccaggttcggatggttcgggaacaaggaaatctcagatattgaagtgcaagaccctgagggattcaacatgattctgggtaccatcctagcccaaatttgggtcttgctcgcaaaggcggttacggccccagacacggcagctgattcggagctaagaaggtggataaagtacacccaacaaagaagggtagttggtgaatttagattggagagaaaatggttggatgtggtgaggaacaggattgccgaggacctctccttacgccgattcatggtcgctctaatcctggatatcaagagaacacccggaaacaaacccaggattgctgaaatgatatgtgacattgatacatatatcgtagaggcaggattagccagttttatcctgactattaagtttgggatagaaactatgtatcctgctcttggactgcatgaatttgctggtgagttatccacacttgagtccttgatgaacctttaccagcaaatgggggaaactgcaccctacatggtaatcctggagaactcaattcagaacaagttcagtgcaggatcataccctctgctctggagctatgccatgggagtaggagtggaacttgaaaactccatgggaggtttgaactttggccgatcttactttgatccagcatattttagattagggcaagagatggtaaggaggtcagctggaaaggtcagttccacattggcatctgaactcggtatcactgccgaggatgcaaggcttgtttcagagattgcaatgcatactactgaggacaagatcagtagagcggttggacccagacaagcccaagtatcatttctacacggtgatcaaagtgagaatgagctaccgagattggggggcaaggaagataggagggtcaaacagagtcgaggagaagccagggagagctacagagaaaccgggcccagcagagcaagtgatgcgagagctgcccatcttccaaccggcacacccctagacattgacactgcaacggagtccagccaagatccgcaggacagtcgaaggtcagctgacgccctgcttaggctgcaagccatggcaggaatctcggaagaacaaggctcagacacggacacccctatagtgtacaatgacagaaatcttctagactaggtgcgagaggccgagggccagaacaacatccgcctaccatccatcattgttataaaaaacttaggaaccaggtccacacagccgccagcccatcaaccatccactcccacgattggagccaatggcagaagagcaggcacgccatgtcaaaaacggactggaatgcatccgggctctcaaggccgagcccatcggctcactggccatcgaggaagctatggcagcatggtcagaaatatcagacaacccaggacaggagcgagccacctgcagggaagagaaggcaggcagttcgggtctcagcaaaccatgcctctcagcaattggatcaactgaaggcggtgcacctcgcatccgcggtcagggacctggagagagcgatgacgacgctgaaactttgggaatccccccaagaaatctccaggcatcaagcactgggttacagtgttattacgtttatgatcacagcggtgaagcggttaagggaatccaagatgctgactctatcatggttcaatcaggccttgatggtgatagcaccctctcaggaggagacaatgaatctgaaaacagcgatgtggatattggcgaacctgataccgagggatatgctatcactgaccggggatctgctcccatctctatggggttcagggcttctgatgttgaaactgcagaaggaggggagatccacgagctcctgagactccaatccagaggcaacaactttccgaagcttgggaaaactctcaatgttcctccgcccccggaccccggtagggccagcacttccgggacacccattaaaaagggcacagacgcgagattagcctcatttggaacggagatcgcgtctttattgacaggtggtgcaacccaatgtgctcgaaagtcaccctcggaaccatcagggccaggtgcacctgcggggaatgtccccgagtgtgtgagcaatgccgcactgatacaggagtggacacccgaatctggtaccacaatctccccgagatcccagaataatgaagaagggggagactattatgatgatgagctgttctctgatgtccaagatattaaaacagccttggccaaaatacacgaggataatcagaagataatctccaagctagaatcactgctgttattgaagggagaagttgagtcaattaagaagcagatcaacaggcaaaatatcagcatatccaccctggaaggacacctctcaagcatcatgatcgccattcctggacttgggaaggatcccaacgaccccactgcagatgtcgaaatcaatcccgacttgaaacccatcataggcagagattcaggccgagcactggccgaagttctcaagaaacccgttgccagccgacaactccaaggaatgacaaatggacggaccagttccagaggacagctgctgaaggaatttcagctaaagccgatcgggaaaaagatgagctcagccgtcgggtttgttcctgacaccggccctgcatcacgcagtgtaatccgctccattataaaatccagccggctagaggaggatcggaagcgttacctgatgactctccttgatgatatcaaaggagccaatgatcttgccaagttccaccagatgctgatgaagataataatgaagtagctacagctcaacttacctgccaaccccatgccagtcgacccaactagcctaccctccatcattgttataaaaaacttaggaaccaggtccacacagccgccagcccatcaacgcgtacggccaccatgttcgtctttctggtattgcttcctctggtgagttcccagtgcgtagcaagtcagagtatcatagcctatactatgagcctgggggcagaaaattctgtcgcttatagtaataacagtattgcaattcctactaacttcactattagcgtgactacagaaattctgccagtgagcatgaccaagacctccgtcgactgtaccatgtatatctgcggagacagcacagaatgcagcaacctgcttctgcagtacggtagcttttgtacccagctgaacagggcactgaccggcatcgctgtggaacaggacaaaaatacgcaggaggtgttcgctcaggtcaagcagatttataagacacccccaataaaagacttcggcggctttaacttctcccagatcctgcccgatccgtcaaaaccttccaagagaagttttatcgaggatctgctgtttaacaaagtaacattggctgatgctggctttattaaacagtacggcgattgtctgggagatatcgccgctagagatctgatctgcgctcaaaaatttaatggcctcactgtattgccccccctgctgacggatgaaatgattgcccaatacacatcagccctgctggctgggacaatcacttccggctggacgttcggtgctggagctgctcttcaaattccatttgccatgcaaatggcttatagattcaacggaattggcgtgacccaaaacgtgctgtacgaaaatcaaaagctgattgctaatcagtttaactccgctatcggtaagatacaggacagcctgtctagtactgccagcgccctcggaaagctccaggatgtggtgaaccagaatgcgcaggcgctgaacacactcgtcaaacagcttagcagcaatttcggcgcaattagcagtgtactgaacgacatcttgtctcggctcgacaaggtcgaggccgaagtgcagattgatcgcctgatcactggccggctccagtctctgcagacctacgtaacccagcaactcatacgcgctgccgaaattcgggcttcagctaacctggccgcaacaaagatgtctgaatgtgttcttgggcagtccaagagggtggacttctgcgggaaaggatatcacctgatgtccttccctcagagcgcccctcatggagtggtgtttcttcatgttacctatgttccggcccaggaaaagaattttaccactgccccagccatttgccatgatggtaaagcacacttcccaagagagggcgtgtttgttagtaacggcacccactggttcgttacccagcgcaatttttacgaacctcaaatcattaccactgacaatacatttgtatcaggcaattgcgacgtggtgatcggaatcgtaaataatacagtctacgatcccctgcagccagagcttgacagctttaaagaggaactggacaaatacttcaaaaatcatacaagccccgacgtcgacctgggagatatttctggcatcaatgcctccgtcgtgaatatccaaaaagagatcgaccgccttaatgaggttgccaaaaacctcaacgagtccctgattgatctgcaggagctggggaagtacgagcagtatatcaaatggccctggtacatctggctgggcttcattgccgggctcatagccatcgtgatggtgacgatcatgctgtgttgcatgacctcttgctgttcttgtctgaaggggtgctgctcttgtgggagttgttgtaaattcgatgaggatgattccgaataagcgcgcagcgcttagacgtctcgcgatcgatactagtacaacctaaatccattataaaaaacttaggagcaaagtgattgcctcccaaggtccacaatgacagagacctacgacttcgacaagtcggcatgggacatcaaagggtcgatcgctccgatacaacccaccacctacagtgatggcaggctggtgccccaggtcagagtcatagatcctggtctaggcgacaggaaggatgaatgctttatgtacatgtttctgctgggggttgttgaggacagcgattccctagggcctccaatcgggcgagcatttgggttcctgcccttaggtgttggcagatccacagcaaagcccgaaaaactcctcaaagaggccactgagcttgacatagttgttagacgtacagcagggctcaatgaaaaactggtgttctacaacaacaccccactaactctcctcacaccttggagaaaggtcctaacaacagggagtgtcttcaacgcaaaccaagtgtgcaatgcggttaatctgataccgctcgataccccgcagaggttccgtgttgtttatatgagcatcacccgtctttcggataacgggtattacaccgttcctagaagaatgctggaattcagatcggtcaatgcagtggccttcaacctgctggtgacccttaggattgacaaggcgataggccctgggaagatcatcgacaatacagagcaacttcctgaggcaacatttatggtccacatcgggaacttcaggagaaagaagagtgaagtctactctgccgattattgcaaaatgaaaatcgaaaagatgggcctggtttttgcacttggtgggatagggggcaccagtcttcacattagaagcacaggcaaaatgagcaagactctccatgcacaactcgggttcaagaagaccttatgttacccgctgatggatatcaatgaagaccttaatcgattactctggaggagcagatgcaagatagtaagaatccaggcagttttgcagccatcagttcctcaagaattccgcatttacgacgacgtgatcataaatgatgaccaaggactattcaaagttctgtagaccgtagtgcccagcaatgcccgaaaacgacccccctcacaatgacagccagaaggcccggacaaaaaagccccctccgaaagactccacggaccaagcgagaggccagccagcagccgacggcaagcgcgaacaccaggcggccccagcacagaacagccctgacacaaggccaccaccagccaccccaatctgcatcctcctcgtgggacccccgaggaccaacccccaaggctgcccccgatccaaaccaccaaccgcatccccaccacccccgggaaagaaacccccagcaattggaaggcccctccccctcttcctcaacacaagaactccacaaccgaaccgcacaagcgaccgaggtgacccaaccgcaggcatccgactccctagacagatcctctctccccggcaaactaaacaaaacttagggccaaggaacatacacacccaacagaacccagaccccggcccacggcgccgcgcccccaacccccgacaaccagagggagcccccaaccaatcccgccggctcccccggtgcccacaggcagggacaccaacccccgaacagacccagcacccaaccatcgacaatccaagacgggggggcccccccaaaaaaaggcccccaggggccgacagccagcaccgcgaggaagcccacccaccccacacacgaccacggcaaccaaaccagaacccagaccaccctgggccaccagctcccagactcggccatcaccccgcagaaaggaaaggccacaacccgcgcaccccagccccgatccggcggggagccacccaacccgaaccagcacccaagagcgatccccgaaggacccccgaaccgcaaaggacatcagtatcccacagcctctccaagtcccccggtctcctcctcttctcgaagggaccaaaagatcaatccaccacacccgacgacactcaactccccacccctaaaggagacaccgggaatcccagaatcaagactcatccaatgtccatcatgggtctcaaggtgaacgtctctgccatattcatggcagtactgttaactctccaaacacccaccggtcaaatccattggggcaatctctctaagataggggtggtaggaataggaagtgcaagctacaaagttatgactcgttccagccatcaatcattagtcataaaattaatgcccaatataactctcctcaataactgcacgagggtagagattgcagaatacaggagactactgagaacagttttggaaccaattagagatgcacttaatgcaatgacccagaatataagaccggttcagagtgtagcttcaagtaggagacacaagagatttgcgggagtagtcctggcaggtgcggccctaggcgttgccacagctgctcagataacagccggcattgcacttcaccagtccatgctgaactctcaagccatcgacaatctgagagcgagcctggaaactactaatcaggcaattgagacaatcagacaagcagggcaggagatgatattggctgttcagggtgtccaagactacatcaataatgagctgataccgtctatgaaccaactatcttgtgatttaatcggccagaagctcgggctcaaattgctcagatactatacagaaatcctgtcattatttggccccagtttacgggaccccatatctgcggagatatctatccaggctttgagctatgcgcttggaggagacatcaataaggtgttagaaaagctcggatacagtggaggtgatttactgggcatcttagagagcggaggaataaaggcccggataactcacgtcgacacagagtcctacttcattgtcctcagtatagcctatccgacgctgtccgagattaagggggtgattgtccaccggctagagggggtctcgtacaacataggctctcaagagtggtataccactgtgcccaagtatgttgcaacccaagggtaccttatctcgaattttgatgagtcatcgtgtactttcatgccagaggggactgtgtgcagccaaaatgccttgtacccgatgagtcctctgctccaagaatgcctccgggggtacaccaagtcctgtgctcgtacactcgtatccgggtcttttgggaaccggttcattttatcacaagggaacctaatagccaattgtgcatcaatcctttgcaagtgttacacaacaggaacgatcattaatcaagaccctgacaagatcctaacatacattgctgccgatcactgcccggtagtcgaggtgaacggcgtgaccatccaagtcgggagcaggaggtatccagacgctgtgtacttgcacagaattgacctcggtcctcccatatcattggagaggttggacgtagggacaaatctggggaatgcaattgctaagttggaggatgccaaggaattgttggagtcatcggaccagatattgaggagtatgaaaggtttatcgagcactagcatagtctacatcctgattgcagtgtgtcttggagggttgatagggatccccgctttaatatgttgctgcagggggcgttgtaacaaaaagggagaacaagttggtatgtcaagaccaggcctaaagcctgatcttacgggaacatcaaaatcctatgtaaggtcgctctgatcctctacaactcttgaaacacaaatgtcccacaagtctcctcttcgtcatcaagcaaccaccgcacccagcatcaagcccacctgaaattatctccggcttccctctggccgaacaatatcggtagttaatcaaaacttagggtgcaagatcatccacaatgtcaccacaacgagaccggataaatgccttctacaaagataacccccatcccaagggaagtaggatagtcattaacagagaacatcttatgattgatagaccttatgttttgctggctgttctgtttgtcatgtttctgagcttgatcgggttgctagccattgcaggcattagacttcatcgggcagccatctacaccgcagagatccataaaagcctcagcaccaatctagatgtaactaactcaatcgagcatcaggtcaaggacgtgctgacaccactcttcaaaatcatcggtgatgaagtgggcctgaggacacctcagagattcactgacctagtgaaattaatctctgacaagattaaattccttaatccggatagggagtacgacttcagagatctcacttggtgtatcaacccgccagagagaatcaaattggattatgatcaatactgtgcagatgtggctgctgaagagctcatgaatgcattggtgaactcaactctactggagaccagaacaaccaatcagttcctagctgtctcaaagggaaactgctcagggcccactacaatcagaggtcaattctcaaacatgtcgctgtccctgttagacttgtatttaggtcgaggttacaatgtgtcatctatagtcactatgacatcccagggaatgtatgggggaacttacctagtggaaaagcctaatctgagcagcaaaaggtcagagttgtcacaactgagcatgtaccgagtgtttgaagtaggtgttatcagaaatccgggtttgggggctccggtgttccatatgacaaactatcttgagcaaccagtcagtaatgatctcagcaactgtatggtggctttgggggagctcaaactcgcagccctttgtcacggggaagattctatcacaattccctatcagggatcagggaaaggtgtcagcttccagctcgtcaagctaggtgtctggaaatccccaaccgacatgcaatcctgggtccccttatcaacggatgatccagtgatagacaggctttacctctcatctcacagaggtgttatcgctgacaatcaagcaaaatgggctgtcccgacaacacgaacagatgacaagttgcgaatggagacatgcttccaacaggcgtgtaagggtaaaatccaagcactctgcgagaatcccgagtgggcaccattgaaggataacaggattccttcatacggggtcttgtctgttgatctgagtctgacagttgagcttaaaatcaaaattgcttcgggattcgggccattgatcacacacggttcagggatggacctatacaaatccaaccacaacaatgtgtattggctgactatcccgccaatgaagaacctagccttaggtgtaatcaacacattggagtggataccgagattcaaggttagtccctacctcttcactgtcccaattaaggaagcaggcgaagactgccatgccccaacatacctacctgcggaggtggatggtgatgtcaaactcagttccaatctggtgattctacctggtcaagatctccaatatgttttggcaacctacgatacttccagggttgaacatgctgtggtttattacgtttacagcccaagccgctcattttcttacttttatccttttaggttgcctataaagggggtccccatcgaattacaagtggaatgcttcacatgggaccaaaaactctggtgccgtcacttctgtgtgcttgcggactcagaatctggtggacatatcactcactctgggatggtgggcatgggagtcagctgcacagtcacccgggaagatggaaccaatcgcagatagggctgctagtgaaccaatcacatgatgtcacccagacatcaggcatacccactagtgtgaaatagacatcagaattaagaaaaacgtagggtccaagtggttccccgttatggactcgctatctgtcaaccagatcttataccctgaagttcacctagatagcccgatagttaccaataagatagtagccatcctggagtatgctcgagtccctcacgcttacagcctggaggaccctacactgtgtcagaacatcaagcaccgcctaaaaaacggattttccaaccaaatgattataaacaatgtggaagttgggaatgtcatcaagtccaagcttaggagttatccggcccactctcatattccatatccaaattgtaatcaggatttatttaacatagaagacaaagagtcaacgaggaagatccgtgaactcctcaaaaaggggaattcgctgtactccaaagtcagtgataaggttttccaatgcttaagggacactaactcacggcttggcctaggctccgaattgagggaggacatcaaggagaaagttattaacttgggagtttacatgcacagctcccagtggtttgagccctttctgttttggtttacagtcaagactgagatgaggtcagtgattaaatcacaaacccatacttgccataggaggagacacacacctgtattcttcactggtagttcagttgagttgctaatctctcgtgaccttgttgctataatcagtaaagagtctcaacatgtatattacctgacatttgaactggttttgatgtattgtgatgtcatagaggggaggttaatgacagagaccgctatgactattgatgctaggtatacagagcttctaggaagagtcagatacatgtggaaactgatagatggtttcttccctgcactcgggaatccaacttatcaaattgtagccatgctggagcctctttcacttgcttacctgcagctgagggatataacagtagaactcagaggtgctttccttaaccactgctttactgaaatacatgatgttcttgaccaaaacgggttttctgatgaaggtacttatcatgagttaactgaagctctagattacattttcataactgatgacatacatctgacaggggagattttctcatttttcagaagtttcggccaccccagacttgaagcagtaacggctgctgaaaatgttaggaaatacatgaatcagcctaaagtcattgtgtatgagactctgatgaaaggtcatgccatattttgtggaatcataatcaacggctatcgtgacaggcacggaggcagttggccaccgctgaccctccccctgcatgctgcagacacaatccggaatgctcaagcttcaggtgaagggttaacacatgagcagtgcgttgataactggaaatcttttgctggagtgaaatttggctgctttatgcctcttagcctggatagtgatctgacaatgtacctaaaggacaaggcacttgctgctctccaaagggaatgggattcagtttacccgaaagagttcctgcgttacgaccctcccaagggaaccgggtcacggaggcttgtagatgttttccttaatgattcgagctttgacccatatgatgtgataatgtatgttgtaagtggagcttacctccatgaccctgagttcaacctgtcttacagcctgaaagaaaaggagatcaaggaaacaggtagactttttgctaaaatgacttacaaaatgagggcatgccaagtgattgctgaaaatctaatctcaaacgggattggcaaatattttaaggacaatgggatggccaaggatgagcacgatttgactaaggcactccacactctagctgtctcaggagtccccaaagatctcaaagaaagtcacaggggggggccagtcttaaaaacctactcccgaagcccagtccacacaagtaccaggaacgtgagagcagcaaaagggtttatagggttccctcaagtaattcggcaggaccaagacactgatcatccggagaatatggaagcttacgagacagtcagtgcatttatcacgactgatctcaagaagtactgccttaattggagatatgagaccatcagcttgtttgcacagaggctaaatgagatttacggattgccctcatttttccagtggctgcataagaggcttgagacctctgtcctgtatgtaagtgaccctcattgcccccccgaccttgacgcccatatcccgttatataaagtccccaatgatcaaatcttcattaagtaccctatgggaggtatagaagggtattgtcagaagctgtggaccatcagcaccattccctatctatacctggctgcttatgagagcggagtaaggattgcttcgttagtgcaaggggacaatcagaccatagccgtaacaaaaagggtacccagcacatggccctacaaccttaagaaacgggaagctgctagagtaactagagattactttgtaattcttaggcaaaggctacatgatattggccatcacctcaaggcaaatgagacaattgtttcatcacatttttttgtctattcaaaaggaatatattatgatgggctacttgtgtcccaatcactcaagagcatcgcaagatgtgtattctggtcagagactatagttgatgaaacaagggcagcatgcagtaatattgctacaacaatggctaaaagcatcgagagaggttatgaccgttaccttgcatattccctgaacgtcctaaaagtgatacagcaaattctgatctctcttggcttcacaatcaattcaaccatgacccgggatgtagtcatacccctcctcacaaacaacgacctcttaataaggatggcactgttgcccgctcctattggggggatgaattatctgaatatgagcaggctgtttgtcagaaacatcggtgatccagtaacatcatcaattgctgatctcaagagaatgattctcgcctcactaatgcctgaagagaccctccatcaagtaatgacacaacaaccgggggactcttcattcctagactgggctagcgacccttactcagcaaatcttgtatgtgtccagagcatcactagactcctcaagaacataactgcaaggtttgtcctgatccatagtccaaacccaatgttaaaaggattattccatgatgacagtaaagaagaggacgagggactggcggcattcctcatggacaggcatattatagtacctagggcagctcatgaaatcctggatcatagtgtcacaggggcaagagagtctattgcaggcatgctggataccacaaaaggcttgattcgagccagcatgaggaagggggggttaacctctcgagtgataaccagattgtccaattatgactatgaacaattcagagcagggatggtgctattgacaggaagaaagagaaatgtcctcattgacaaagagtcatgttcagtgcagctggcgagagctctaagaagccatatgtgggcgaggctagctcgaggacggcctatttacggccttgaggtccctgatgtactagaatctatgcgaggccaccttattcggcgtcatgagacatgtgtcatctgcgagtgtggatcagtcaactacggatggttttttgtcccctcgggttgccaactggatgatattgacaaggaaacatcatccttgagagtcccatatattggttctaccactgatgagagaacagacatgaagcttgccttcgtaagagccccaagtcgatccttgcgatctgctgttagaatagcaacagtgtactcatgggcttacggtgatgatgatagctcttggaacgaagcctggttgttggctaggcaaagggccaatgtgagcctggaggagctaagggtgatcactcccatctcaacttcgactaatttagcgcataggttgagggatcgtagcactcaagtgaaatactcaggtacatcccttgtccgagtggcgaggtataccacaatctccaacgacaatctctcatttgtcatatcagataagaaggttgatactaactttatataccaacaaggaatgcttctagggttgggtgttttagaaacattgtttcgactcgagaaagataccggatcatctaacacggtattacatcttcacgtcgaaacagattgttgcgtgatcccgatgatagatcatcccaggatacccagctcccgcaagctagagctgagggcagagctatgtaccaacccattgatatatgataatgcacctttaattgacagagatgcaacaaggctatacacccagagccataggaggcaccttgtggaatttgttacatggtccacaccccaactatatcacattttagctaagtccacagcactatctatgattgacctggtaacaaaatttgagaaggaccatatgaatgaaatttcagctctcataggggatgacgatatcaatagtttcataactgagtttctgctcatagagccaagattattcactatctacttgggccagtgtgcggccatcaattgggcatttgatgtacattatcatagaccatcagggaaatatcagatgggtgagctgttgtcatcgttcctttctagaatgagcaaaggagtgtttaaggtgcttgtcaatgctctaagccacccaaagatctacaagaaattctggcattgtggtattatagagcctatccatggtccttcacttgatgctcaaaacttgcacacaactgtgtgcaacatggtttacacatgctatatgacctacctcgacctgttgttgaatgaagagttagaagagttcacatttctcttgtgtgaaagcgacgaggatgtagtaccggacagattcgacaacatccaggcaaaacacttatgtgttctggcagatttgtactgtcaaccagggacctgcccaccaattcgaggtctaagaccggtagagaaatgtgcagttctaaccgaccatatcaaggcagaggctatgttatctccagcaggatcttcgtggaacataaatccaattattgtagaccattactcatgctctctgacttatctccggcgaggatcgatcaaacagataagattgagagttgatccaggattcattttcgacgccctcgctgaggtaaatgtcagtcagccaaagatcggcagcaacaacatctcaaatatgagcatcaaggctttcagacccccacacgatgatgttgcaaaattgctcaaagatatcaacacaagcaagcacaatcttcccatttcagggggcaatctcgccaattatgaaatccatgctttccgcagaatcgggttgaactcatctgcttgctacaaagctgttgagatatcaacattaattaggagatgccttgagccaggggaggacggcttgttcttgggtgagggatcgggttctatgttgatcacttataaagagatacttaaactaaacaagtgcttctataatagtggggtttccgccaattctagatctggtcaaagggaattagcaccctatccctccgaagttggccttgtcgaacacagaatgggagtaggtaatattgtcaaagtgctctttaacgggaggcccgaagtcacgtgggtaggcagtgtagattgcttcaatttcatagttagtaatatccctacctctagtgtggggtttatccattcagatatagagaccttgcctgacaaagatactatagagaagctagaggaattggcagccatcttatcgatggctctgctcctgggcaaaataggatcaatactggtgattaagcttatgcctttcagcggggattttgttcagggatttataagttatgtagggtctcattatagagaagtgaaccttgtataccctagatacagcaacttcatctctactgaatcttatttggttatgacagatctcaaggctaaccggctaatgaatcctgaaaagattaagcagcagataattgaatcatctgtgaggacttcacctggacttataggtcacatcctatccattaagcaactaagctgcatacaagcaattgtgggagacgcagttagtagaggtgatatcaatcctactctgaaaaaacttacacctatagagcaggtgctgatcaattgcgggttggcaattaacggacctaagctgtgcaaagaattgatccaccatgatgttgcctcagggcaagatggattgcttaattctatactcatcctctacagggagttggcaagattcaaagacaaccaaagaagtcaacaagggatgttccacgcttaccccgtattggtaagtagcaggcaacgagaacttatatctaggatcacccgcaaattctgggggcacattcttctttactccgggaacaaaaagttgataaataagtttatccagaatctcaagtccggctatctgatactagacttacaccagaatatcttcgttaagaatctatccaagtcagagaaacagattattatgacggggggtttgaaacgtgagtgggtttttaaggtaacagtcaaggagaccaaagaatggtataagttagtcggatacagtgccctgattaaggactaattggttgaactccggaaccctaatcctgccctaggtggttaggcattatttgcaatatattaaagaaaactttgaaaatacgaagtttctattcccagctttgtctggtggccggcatggtcccagcctcctcgctggcgccggctgggcaacattccgaggggaccgtcccctcggtaatggcgaatgggacgcggccgatccggctgctaacaaagcccgaaaggaagctgagttggctgctgccaccgctgagcaataactagcataaccccttggggcctctaaacgggtcttgaggggttttttgctgaaaggaggaactatatccggatgcggccgcgggccctatggtacccagcttttgttccctttagtgagggttaattccgagcttggcgtaatcatggtcatagctgtttcctgtgtgaaattgttatccgctcacaattccacacaacataggagccggaagcataaagtgtaaagcctggggtgcctaatgagtgaggtaactcacattaattgcgttgcgctcactgcccgctttccagtcgggaaacctgtcgtgccagctgcattaatgaatcggccaacgcgcggggagaggcggtttgcgtattgggcgctcttccgcttcctcgctcactgactcgctgcgctcggtcgttcggctgcggcgagcggtatcagctcactcaaaggcggtaatacggttatccacagaatcaggggataacgcaggaaagaacatgtgagcaaaaggccagcaaaaggccaggaaccgtaaaaaggccgcgttgctggcgtttttccataggctcggcccccctgacgagcatcacaaaaatcgacgctcaagtcagaggtggcgaaacccgacaggactataaagataccaggcgttcccccctggaagctccctcgtgcgctctcctgttccgaccctgccgcttaccggatacctgtccgcctttctcccttcgggaagcgtggcgctttctcaatgctcacgctgtaggtatctcagttcggtgtaggtcgttcgctccaagctgggctgtgtgcacgaaccccccgttcagcccgaccgctgcgccttatccggtaactatcgtcttgagtccaacccggtaagacacgacttatcgccactggcagcagccactggtaacaggattagcagagcgaggtatgtaggcggtgctacagagttcttgaagtggtggcctaactacggctacactagaaggacagtatttggtatctgcgctctgctgaagccagttaccttcggaaaaagagttggtagctcttgatccggcaaacaaaccaccgctggtagcggtggtttttttgtttgcaagcagcagattacgcgcagaaaaaaaggatctcaagaagatcctttgatcttttctacggggtctgacgctcagtggaacgaaaactcacgttaagggattttggtcatgagattatcaaaaaggatcttcacctagatccttttaaattaaaaatgaagttttaaatcaatctaaagtatatatgagtaaacttggtctgacagttaccaatgcttaatcagtgaggcacctatctcagcgatctgtctatttcgttcatccatagttgcctgactgcccgtcgtgtagataactacgatacgggagggcttaccatctggccccagtgctgcaatgataccgcgagacccacgctcaccggctccagatttatcagcaataaaccagccagccggaagggccgagcgcagaagtggtcctgcaactttatccgcctccatccagtctattaattgttgccgggaagctagagtaagtagttcgccagttaatagtttgcgcaacgttgttgccattgctacaggcatcgtggtgtcacgctcgtcgtttggtatggcttcattcagctccggttcccaacgatcaaggcgagttacatgatcccccatgttgtgaaaaaaagcggttagctccttcggtcctccgatcgttgtcagaagtaagttggccgcagtgttatcactcatgcttatggcagcactgcataattctcttactgtcatgccatccgtaagatgcttttctgtgactggtgagtactcaaccaagtcattctgagaatagtgtatgcggcgaccgagttgctcttgcccggcgtcaatacgggataataccgcgccacatagcagaactttaaaagtgctcatcattggaaaacgttcttcggggcgaaaactctcaaggatcttaccgctgttgagatccagttcgatgtaacccactcgtgcacccaactgatcttcagcatcttttactttcaccagcgtttctgggtgagcaaaaacaggaaggcaaaatgccgcaaaaaagggaataagggcgacacggaaatgttgaatactcatactcttcctttttcaatattattgaagcatttatcagggttattgtctcatgagcggatacatatttgaatgtatttagaaaaataaacaaataggggttccgcgcacatttccccgaaaagtgccacctgaaattgtaaacgttaatattttgttaaaattcgcgttaaatttttgttaaatcagctcattttttaaccaataggccgaaatcggcaaaatcccttataaatcaaaagaatagaccgagatagggttgagtgttgttccagtttggaacaagagtccactattaaagaacgtggactccaacgtcaaagggcgaaaaaccgtctatcagggcgatggcccactacgtgaaccatcaccctaatcaagttttttggggtcgaggtgccgtaaagcactaaatcggaaccctaaagggagcccccgatttagagcttgacggggaaagccggcgaacgtggcgagaaaggaagggaagaaagcgaaaggagcgggcgctagggcgctggcaagtgtagcggtcacgctgcgcgtaaccaccacacccgccgcgcttaatgcgccgctacagggcgcgtcccatt

SEQ ID NO: 146 - DNA, 22796 bp, Artificial sequence
  pTM2-SF-2P-dER_SARS-CoV-2 (optimized sequence)
tgtccgctaatacgactcactatagggccaactttgtttggtctgatgagtccgtgaggacgaaacccggagtcccgggtcaccaaacaaagttgggtaaggatagttcaatcaatgatcatcttctagtgcacttaggattcaagatcctattatcagggacaagagcaggattagggatatccgagatggccacacttttaaggagcttagcattgttcaaaagaaacaaggacaaaccacccattacatcaggatccggtggagccatcagaggaatcaaacacattattatagtaccaatccctggagattcctcaattaccactcgatccagacttctggaccggttggtgaggttaattggaaacccggatgtgagcgggcccaaactaacaggggcactaataggtatattatccttatttgtggagtctccaggtcaattgattcagaggatcaccgatgaccctgacgttagcataaggctgttagaggttgtccagagtgaccagtcacaatctggccttaccttcgcatcaagaggtaccaacatggaggatgaggcggaccaatacttttcacatgatgatccaattagtagtgatcaatccaggttcggatggttcgggaacaaggaaatctcagatattgaagtgcaagaccctgagggattcaacatgattctgggtaccatcctagcccaaatttgggtcttgctcgcaaaggcggttacggccccagacacggcagctgattcggagctaagaaggtggataaagtacacccaacaaagaagggtagttggtgaatttagattggagagaaaatggttggatgtggtgaggaacaggattgccgaggacctctccttacgccgattcatggtcgctctaatcctggatatcaagagaacacccggaaacaaacccaggattgctgaaatgatatgtgacattgatacatatatcgtagaggcaggattagccagttttatcctgactattaagtttgggatagaaactatgtatcctgctcttggactgcatgaatttgctggtgagttatccacacttgagtccttgatgaacctttaccagcaaatgggggaaactgcaccctacatggtaatcctggagaactcaattcagaacaagttcagtgcaggatcataccctctgctctggagctatgccatgggagtaggagtggaacttgaaaactccatgggaggtttgaactttggccgatcttactttgatccagcatattttagattagggcaagagatggtaaggaggtcagctggaaaggtcagttccacattggcatctgaactcggtatcactgccgaggatgcaaggcttgtttcagagattgcaatgcatactactgaggacaagatcagtagagcggttggacccagacaagcccaagtatcatttctacacggtgatcaaagtgagaatgagctaccgagattggggggcaaggaagataggagggtcaaacagagtcgaggagaagccagggagagctacagagaaaccgggcccagcagagcaagtgatgcgagagctgcccatcttccaaccggcacacccctagacattgacactgcaacggagtccagccaagatccgcaggacagtcgaaggtcagctgacgccctgcttaggctgcaagccatggcaggaatctcggaagaacaaggctcagacacggacacccctatagtgtacaatgacagaaatcttctagactaggtgcgagaggccgagggccagaacaacatccgcctaccatccatcattgttataaaaaacttaggaaccaggtccacacagccgccagcccatcaaccatccactcccacgattggagccaatggcagaagagcaggcacgccatgtcaaaaacggactggaatgcatccgggctctcaaggccgagcccatcggctcactggccatcgaggaagctatggcagcatggtcagaaatatcagacaacccaggacaggagcgagccacctgcagggaagagaaggcaggcagttcgggtctcagcaaaccatgcctctcagcaattggatcaactgaaggcggtgcacctcgcatccgcggtcagggacctggagagagcgatgacgacgctgaaactttgggaatccccccaagaaatctccaggcatcaagcactgggttacagtgttattacgtttatgatcacagcggtgaagcggttaagggaatccaagatgctgactctatcatggttcaatcaggccttgatggtgatagcaccctctcaggaggagacaatgaatctgaaaacagcgatgtggatattggcgaacctgataccgagggatatgctatcactgaccggggatctgctcccatctctatggggttcagggcttctgatgttgaaactgcagaaggaggggagatccacgagctcctgagactccaatccagaggcaacaactttccgaagcttgggaaaactctcaatgttcctccgcccccggaccccggtagggccagcacttccgggacacccattaaaaagggcacagacgcgagattagcctcatttggaacggagatcgcgtctttattgacaggtggtgcaacccaatgtgctcgaaagtcaccctcggaaccatcagggccaggtgcacctgcggggaatgtccccgagtgtgtgagcaatgccgcactgatacaggagtggacacccgaatctggtaccacaatctccccgagatcccagaataatgaagaagggggagactattatgatgatgagctgttctctgatgtccaagatattaaaacagccttggccaaaatacacgaggataatcagaagataatctccaagctagaatcactgctgttattgaagggagaagttgagtcaattaagaagcagatcaacaggcaaaatatcagcatatccaccctggaaggacacctctcaagcatcatgatcgccattcctggacttgggaaggatcccaacgaccccactgcagatgtcgaaatcaatcccgacttgaaacccatcataggcagagattcaggccgagcactggccgaagttctcaagaaacccgttgccagccgacaactccaaggaatgacaaatggacggaccagttccagaggacagctgctgaaggaatttcagctaaagccgatcgggaaaaagatgagctcagccgtcgggtttgttcctgacaccggccctgcatcacgcagtgtaatccgctccattataaaatccagccggctagaggaggatcggaagcgttacctgatgactctccttgatgatatcaaaggagccaatgatcttgccaagttccaccagatgctgatgaagataataatgaagtagctacagctcaacttacctgccaaccccatgccagtcgacccaactagcctaccctccatcattgttataaaaaacttaggaaccaggtccacacagccgccagcccatcaacgcgtacggccaccatgttcgtctttctggtattgcttcctctggtgagttcccagtgcgtgaacctgacgactcggacacagctgccgcctgcatacacaaacagcttcacacgaggtgtttactatccggacaaggtgttccggtcctctgtcttgcacagtactcaggacctttttctgccattctttagtaacgtaacatggttccacgctatccatgtaagtggaaccaatggcaccaagcgcttcgacaatccagtcctgcctttcaacgatggcgtctacttcgcctctaccgagaaatcaaatattattagagggtggatcttcgggaccacccttgatagcaagactcagagtcttctgatcgtgaacaatgctactaacgtcgtcataaaagtatgtgaatttcagttctgcaatgaccccttcctgggcgtgtactatcacaaaaataacaagtcctggatggaatccgagtttcgggtatacagcagcgctaataactgtaccttcgaatatgtgagccagccattcctgatggacctggaggggaagcagggcaacttcaaaaacctgagggaattcgtgttcaagaacattgacggatacttcaaaatctacagcaagcacactccaattaatcttgttagggaccttcctcaggggttctccgcgctggaacccttggtggatctgccaattggtattaacatcacgaggtttcaaaccctgctcgccctccaccggtcatacctgaccccaggtgatagtagtagtggctggacagcaggggccgcagcatactacgtcggctacctccagccccgcacattcctgctgaagtataatgaaaacggtactattacagatgctgtggactgcgcacttgatccattgtccgagactaaatgcaccttgaagtcttttaccgttgagaagggaatctatcagaccagtaatttcagagtgcaacccaccgagagcatcgtgcgatttcctaatattacaaacctgtgcccttttggcgaggtgtttaacgccactcgcttcgcgagcgtgtatgcatggaaccggaaaaggattagcaactgcgtggctgattattcagtcctttataatagtgcctctttcagtacgttcaaatgctatggagtgtccccaactaagcttaacgatctgtgttttaccaacgtgtatgccgactctttcgtcatcaggggcgacgaggttagacaaattgcgcccggacagacaggcaaaattgctgactacaattataaactgccagatgactttacaggatgcgtgattgcctggaacagcaacaaccttgattctaaggtgggcggaaactacaactatctgtacaggctgttccgcaaatcaaacctgaagccattcgaaagggacatttcaactgagatctaccaggccggatctacaccttgcaacggggtggaaggattcaactgctacttcccgctccagtcatatggctttcaacctaccaatggagtgggctaccaaccttatcgagtagttgttctctctttcgagttgttgcatgccccagccactgtctgcggaccaaagaaatccaccaatctggtgaaaaacaagtgcgtcaacttcaacttcaatggactcaccggtacaggggttcttaccgagtcaaacaagaaattccttccgtttcagcagtttggacgcgatatcgccgacactacggatgcagtacgcgatcctcagacacttgagatcctggacatcactccatgctcttttggaggggtgtctgtcatcactcccgggacgaataccagtaatcaggtcgccgtgctctatcaagatgtcaactgcacagaggtgccagtcgccattcacgccgatcagcttacccctacttggcgagtatatagcacagggtccaacgtgtttcagacaagggcgggttgtctgatcggcgctgagcacgtcaataatagctacgaatgtgacatccctattggagccgggatttgcgctagctatcagactcagactaactcaccccggcgagctaggtctgtagcaagtcagagtatcatagcctatactatgagcctgggggcagaaaattctgtcgcttatagtaataacagtattgcaattcctactaacttcactattagcgtgactacagaaattctgccagtgagcatgaccaagacctccgtcgactgtaccatgtatatctgcggagacagcacagaatgcagcaacctgcttctgcagtacggtagcttttgtacccagctgaacagggcactgaccggcatcgctgtggaacaggacaaaaatacgcaggaggtgttcgctcaggtcaagcagatttataagacacccccaataaaagacttcggcggctttaacttctcccagatcctgcccgatccgtcaaaaccttccaagagaagttttatcgaggatctgctgtttaacaaagtaacattggctgatgctggctttattaaacagtacggcgattgtctgggagatatcgccgctagagatctgatctgcgctcaaaaatttaatggcctcactgtattgccccccctgctgacggatgaaatgattgcccaatacacatcagccctgctggctgggacaatcacttccggctggacgttcggtgctggagctgctcttcaaattccatttgccatgcaaatggcttatagattcaacggaattggcgtgacccaaaacgtgctgtacgaaaatcaaaagctgattgctaatcagtttaactccgctatcggtaagatacaggacagcctgtctagtactgccagcgccctcggaaagctccaggatgtggtgaaccagaatgcgcaggcgctgaacacactcgtcaaacagcttagcagcaatttcggcgcaattagcagtgtactgaacgacatcttgtctcggctcgacccaccagaggccgaagtgcagattgatcgcctgatcactggccggctccagtctctgcagacctacgtaacccagcaactcatacgcgctgccgaaattcgggcttcagctaacctggccgcaacaaagatgtctgaatgtgttcttgggcagtccaagagggtggacttctgcgggaaaggatatcacctgatgtccttccctcagagcgcccctcatggagtggtgtttcttcatgttacctatgttccggcccaggaaaagaattttaccactgccccagccatttgccatgatggtaaagcacacttcccaagagagggcgtgtttgttagtaacggcacccactggttcgttacccagcgcaatttttacgaacctcaaatcattaccactgacaatacatttgtatcaggcaattgcgacgtggtgatcggaatcgtaaataatacagtctacgatcccctgcagccagagcttgacagctttaaagaggaactggacaaatacttcaaaaatcatacaagccccgacgtcgacctgggagatatttctggcatcaatgcctccgtcgtgaatatccaaaaagagatcgaccgccttaatgaggttgccaaaaacctcaacgagtccctgattgatctgcaggagctggggaagtacgagcagtatatcaaatggccctggtacatctggctgggcttcattgccgggctcatagccatcgtgatggtgacgatcatgctgtgttgcatgacctcttgctgttcttgtctgaaggggtgctgctcttgtgggagttgttgtaaattcgatgaggatgattccgaataataggcgcgcagcgcttagacgtctcgcgatcgatactagtacaacctaaatccattataaaaaacttaggagcaaagtgattgcctcccaaggtccacaatgacagagacctacgacttcgacaagtcggcatgggacatcaaagggtcgatcgctccgatacaacccaccacctacagtgatggcaggctggtgccccaggtcagagtcatagatcctggtctaggcgacaggaaggatgaatgctttatgtacatgtttctgctgggggttgttgaggacagcgattccctagggcctccaatcgggcgagcatttgggttcctgcccttaggtgttggcagatccacagcaaagcccgaaaaactcctcaaagaggccactgagcttgacatagttgttagacgtacagcagggctcaatgaaaaactggtgttctacaacaacaccccactaactctcctcacaccttggagaaaggtcctaacaacagggagtgtcttcaacgcaaaccaagtgtgcaatgcggttaatctgataccgctcgataccccgcagaggttccgtgttgtttatatgagcatcacccgtctttcggataacgggtattacaccgttcctagaagaatgctggaattcagatcggtcaatgcagtggccttcaacctgctggtgacccttaggattgacaaggcgataggccctgggaagatcatcgacaatacagagcaacttcctgaggcaacatttatggtccacatcgggaacttcaggagaaagaagagtgaagtctactctgccgattattgcaaaatgaaaatcgaaaagatgggcctggtttttgcacttggtgggatagggggcaccagtcttcacattagaagcacaggcaaaatgagcaagactctccatgcacaactcgggttcaagaagaccttatgttacccgctgatggatatcaatgaagaccttaatcgattactctggaggagcagatgcaagatagtaagaatccaggcagttttgcagccatcagttcctcaagaattccgcatttacgacgacgtgatcataaatgatgaccaaggactattcaaagttctgtagaccgtagtgcccagcaatgcccgaaaacgacccccctcacaatgacagccagaaggcccggacaaaaaagccccctccgaaagactccacggaccaagcgagaggccagccagcagccgacggcaagcgcgaacaccaggcggccccagcacagaacagccctgacacaaggccaccaccagccaccccaatctgcatcctcctcgtgggacccccgaggaccaacccccaaggctgcccccgatccaaaccaccaaccgcatccccaccacccccgggaaagaaacccccagcaattggaaggcccctccccctcttcctcaacacaagaactccacaaccgaaccgcacaagcgaccgaggtgacccaaccgcaggcatccgactccctagacagatcctctctccccggcaaactaaacaaaacttagggccaaggaacatacacacccaacagaacccagaccccggcccacggcgccgcgcccccaacccccgacaaccagagggagcccccaaccaatcccgccggctcccccggtgcccacaggcagggacaccaacccccgaacagacccagcacccaaccatcgacaatccaagacgggggggcccccccaaaaaaaggcccccaggggccgacagccagcaccgcgaggaagcccacccaccccacacacgaccacggcaaccaaaccagaacccagaccaccctgggccaccagctcccagactcggccatcaccccgcagaaaggaaaggccacaacccgcgcaccccagccccgatccggcggggagccacccaacccgaaccagcacccaagagcgatccccgaaggacccccgaaccgcaaaggacatcagtatcccacagcctctccaagtcccccggtctcctcctcttctcgaagggaccaaaagatcaatccaccacacccgacgacactcaactccccacccctaaaggagacaccgggaatcccagaatcaagactcatccaatgtccatcatgggtctcaaggtgaacgtctctgccatattcatggcagtactgttaactctccaaacacccaccggtcaaatccattggggcaatctctctaagataggggtggtaggaataggaagtgcaagctacaaagttatgactcgttccagccatcaatcattagtcataaaattaatgcccaatataactctcctcaataactgcacgagggtagagattgcagaatacaggagactactgagaacagttttggaaccaattagagatgcacttaatgcaatgacccagaatataagaccggttcagagtgtagcttcaagtaggagacacaagagatttgcgggagtagtcctggcaggtgcggccctaggcgttgccacagctgctcagataacagccggcattgcacttcaccagtccatgctgaactctcaagccatcgacaatctgagagcgagcctggaaactactaatcaggcaattgagacaatcagacaagcagggcaggagatgatattggctgttcagggtgtccaagactacatcaataatgagctgataccgtctatgaaccaactatcttgtgatttaatcggccagaagctcgggctcaaattgctcagatactatacagaaatcctgtcattatttggccccagtttacgggaccccatatctgcggagatatctatccaggctttgagctatgcgcttggaggagacatcaataaggtgttagaaaagctcggatacagtggaggtgatttactgggcatcttagagagcggaggaataaaggcccggataactcacgtcgacacagagtcctacttcattgtcctcagtatagcctatccgacgctgtccgagattaagggggtgattgtccaccggctagagggggtctcgtacaacataggctctcaagagtggtataccactgtgcccaagtatgttgcaacccaagggtaccttatctcgaattttgatgagtcatcgtgtactttcatgccagaggggactgtgtgcagccaaaatgccttgtacccgatgagtcctctgctccaagaatgcctccgggggtacaccaagtcctgtgctcgtacactcgtatccgggtcttttgggaaccggttcattttatcacaagggaacctaatagccaattgtgcatcaatcctttgcaagtgttacacaacaggaacgatcattaatcaagaccctgacaagatcctaacatacattgctgccgatcactgcccggtagtcgaggtgaacggcgtgaccatccaagtcgggagcaggaggtatccagacgctgtgtacttgcacagaattgacctcggtcctcccatatcattggagaggttggacgtagggacaaatctggggaatgcaattgctaagttggaggatgccaaggaattgttggagtcatcggaccagatattgaggagtatgaaaggtttatcgagcactagcatagtctacatcctgattgcagtgtgtcttggagggttgatagggatccccgctttaatatgttgctgcagggggcgttgtaacaaaaagggagaacaagttggtatgtcaagaccaggcctaaagcctgatcttacgggaacatcaaaatcctatgtaaggtcgctctgatcctctacaactcttgaaacacaaatgtcccacaagtctcctcttcgtcatcaagcaaccaccgcacccagcatcaagcccacctgaaattatctccggcttccctctggccgaacaatatcggtagttaatcaaaacttagggtgcaagatcatccacaatgtcaccacaacgagaccggataaatgccttctacaaagataacccccatcccaagggaagtaggatagtcattaacagagaacatcttatgattgatagaccttatgttttgctggctgttctgtttgtcatgtttctgagcttgatcgggttgctagccattgcaggcattagacttcatcgggcagccatctacaccgcagagatccataaaagcctcagcaccaatctagatgtaactaactcaatcgagcatcaggtcaaggacgtgctgacaccactcttcaaaatcatcggtgatgaagtgggcctgaggacacctcagagattcactgacctagtgaaattaatctctgacaagattaaattccttaatccggatagggagtacgacttcagagatctcacttggtgtatcaacccgccagagagaatcaaattggattatgatcaatactgtgcagatgtggctgctgaagagctcatgaatgcattggtgaactcaactctactggagaccagaacaaccaatcagttcctagctgtctcaaagggaaactgctcagggcccactacaatcagaggtcaattctcaaacatgtcgctgtccctgttagacttgtatttaggtcgaggttacaatgtgtcatctatagtcactatgacatcccagggaatgtatgggggaacttacctagtggaaaagcctaatctgagcagcaaaaggtcagagttgtcacaactgagcatgtaccgagtgtttgaagtaggtgttatcagaaatccgggtttgggggctccggtgttccatatgacaaactatcttgagcaaccagtcagtaatgatctcagcaactgtatggtggctttgggggagctcaaactcgcagccctttgtcacggggaagattctatcacaattccctatcagggatcagggaaaggtgtcagcttccagctcgtcaagctaggtgtctggaaatccccaaccgacatgcaatcctgggtccccttatcaacggatgatccagtgatagacaggctttacctctcatctcacagaggtgttatcgctgacaatcaagcaaaatgggctgtcccgacaacacgaacagatgacaagttgcgaatggagacatgcttccaacaggcgtgtaagggtaaaatccaagcactctgcgagaatcccgagtgggcaccattgaaggataacaggattccttcatacggggtcttgtctgttgatctgagtctgacagttgagcttaaaatcaaaattgcttcgggattcgggccattgatcacacacggttcagggatggacctatacaaatccaaccacaacaatgtgtattggctgactatcccgccaatgaagaacctagccttaggtgtaatcaacacattggagtggataccgagattcaaggttagtccctacctcttcactgtcccaattaaggaagcaggcgaagactgccatgccccaacatacctacctgcggaggtggatggtgatgtcaaactcagttccaatctggtgattctacctggtcaagatctccaatatgttttggcaacctacgatacttccagggttgaacatgctgtggtttattacgtttacagcccaagccgctcattttcttacttttatccttttaggttgcctataaagggggtccccatcgaattacaagtggaatgcttcacatgggaccaaaaactctggtgccgtcacttctgtgtgcttgcggactcagaatctggtggacatatcactcactctgggatggtgggcatgggagtcagctgcacagtcacccgggaagatggaaccaatcgcagatagggctgctagtgaaccaatcacatgatgtcacccagacatcaggcatacccactagtgtgaaatagacatcagaattaagaaaaacgtagggtccaagtggttccccgttatggactcgctatctgtcaaccagatcttataccctgaagttcacctagatagcccgatagttaccaataagatagtagccatcctggagtatgctcgagtccctcacgcttacagcctggaggaccctacactgtgtcagaacatcaagcaccgcctaaaaaacggattttccaaccaaatgattataaacaatgtggaagttgggaatgtcatcaagtccaagcttaggagttatccggcccactctcatattccatatccaaattgtaatcaggatttatttaacatagaagacaaagagtcaacgaggaagatccgtgaactcctcaaaaaggggaattcgctgtactccaaagtcagtgataaggttttccaatgcttaagggacactaactcacggcttggcctaggctccgaattgagggaggacatcaaggagaaagttattaacttgggagtttacatgcacagctcccagtggtttgagccctttctgttttggtttacagtcaagactgagatgaggtcagtgattaaatcacaaacccatacttgccataggaggagacacacacctgtattcttcactggtagttcagttgagttgctaatctctcgtgaccttgttgctataatcagtaaagagtctcaacatgtatattacctgacatttgaactggttttgatgtattgtgatgtcatagaggggaggttaatgacagagaccgctatgactattgatgctaggtatacagagcttctaggaagagtcagatacatgtggaaactgatagatggtttcttccctgcactcgggaatccaacttatcaaattgtagccatgctggagcctctttcacttgcttacctgcagctgagggatataacagtagaactcagaggtgctttccttaaccactgctttactgaaatacatgatgttcttgaccaaaacgggttttctgatgaaggtacttatcatgagttaactgaagctctagattacattttcataactgatgacatacatctgacaggggagattttctcatttttcagaagtttcggccaccccagacttgaagcagtaacggctgctgaaaatgttaggaaatacatgaatcagcctaaagtcattgtgtatgagactctgatgaaaggtcatgccatattttgtggaatcataatcaacggctatcgtgacaggcacggaggcagttggccaccgctgaccctccccctgcatgctgcagacacaatccggaatgctcaagcttcaggtgaagggttaacacatgagcagtgcgttgataactggaaatcttttgctggagtgaaatttggctgctttatgcctcttagcctggatagtgatctgacaatgtacctaaaggacaaggcacttgctgctctccaaagggaatgggattcagtttacccgaaagagttcctgcgttacgaccctcccaagggaaccgggtcacggaggcttgtagatgttttccttaatgattcgagctttgacccatatgatgtgataatgtatgttgtaagtggagcttacctccatgaccctgagttcaacctgtcttacagcctgaaagaaaaggagatcaaggaaacaggtagactttttgctaaaatgacttacaaaatgagggcatgccaagtgattgctgaaaatctaatctcaaacgggattggcaaatattttaaggacaatgggatggccaaggatgagcacgatttgactaaggcactccacactctagctgtctcaggagtccccaaagatctcaaagaaagtcacaggggggggccagtcttaaaaacctactcccgaagcccagtccacacaagtaccaggaacgtgagagcagcaaaagggtttatagggttccctcaagtaattcggcaggaccaagacactgatcatccggagaatatggaagcttacgagacagtcagtgcatttatcacgactgatctcaagaagtactgccttaattggagatatgagaccatcagcttgtttgcacagaggctaaatgagatttacggattgccctcatttttccagtggctgcataagaggcttgagacctctgtcctgtatgtaagtgaccctcattgcccccccgaccttgacgcccatatcccgttatataaagtccccaatgatcaaatcttcattaagtaccctatgggaggtatagaagggtattgtcagaagctgtggaccatcagcaccattccctatctatacctggctgcttatgagagcggagtaaggattgcttcgttagtgcaaggggacaatcagaccatagccgtaacaaaaagggtacccagcacatggccctacaaccttaagaaacgggaagctgctagagtaactagagattactttgtaattcttaggcaaaggctacatgatattggccatcacctcaaggcaaatgagacaattgtttcatcacatttttttgtctattcaaaaggaatatattatgatgggctacttgtgtcccaatcactcaagagcatcgcaagatgtgtattctggtcagagactatagttgatgaaacaagggcagcatgcagtaatattgctacaacaatggctaaaagcatcgagagaggttatgaccgttaccttgcatattccctgaacgtcctaaaagtgatacagcaaattctgatctctcttggcttcacaatcaattcaaccatgacccgggatgtagtcatacccctcctcacaaacaacgacctcttaataaggatggcactgttgcccgctcctattggggggatgaattatctgaatatgagcaggctgtttgtcagaaacatcggtgatccagtaacatcatcaattgctgatctcaagagaatgattctcgcctcactaatgcctgaagagaccctccatcaagtaatgacacaacaaccgggggactcttcattcctagactgggctagcgacccttactcagcaaatcttgtatgtgtccagagcatcactagactcctcaagaacataactgcaaggtttgtcctgatccatagtccaaacccaatgttaaaaggattattccatgatgacagtaaagaagaggacgagggactggcggcattcctcatggacaggcatattatagtacctagggcagctcatgaaatcctggatcatagtgtcacaggggcaagagagtctattgcaggcatgctggataccacaaaaggcttgattcgagccagcatgaggaagggggggttaacctctcgagtgataaccagattgtccaattatgactatgaacaattcagagcagggatggtgctattgacaggaagaaagagaaatgtcctcattgacaaagagtcatgttcagtgcagctggcgagagctctaagaagccatatgtgggcgaggctagctcgaggacggcctatttacggccttgaggtccctgatgtactagaatctatgcgaggccaccttattcggcgtcatgagacatgtgtcatctgcgagtgtggatcagtcaactacggatggttttttgtcccctcgggttgccaactggatgatattgacaaggaaacatcatccttgagagtcccatatattggttctaccactgatgagagaacagacatgaagcttgccttcgtaagagccccaagtcgatccttgcgatctgctgttagaatagcaacagtgtactcatgggcttacggtgatgatgatagctcttggaacgaagcctggttgttggctaggcaaagggccaatgtgagcctggaggagctaagggtgatcactcccatctcaacttcgactaatttagcgcataggttgagggatcgtagcactcaagtgaaatactcaggtacatcccttgtccgagtggcgaggtataccacaatctccaacgacaatctctcatttgtcatatcagataagaaggttgatactaactttatataccaacaaggaatgcttctagggttgggtgttttagaaacattgtttcgactcgagaaagataccggatcatctaacacggtattacatcttcacgtcgaaacagattgttgcgtgatcccgatgatagatcatcccaggatacccagctcccgcaagctagagctgagggcagagctatgtaccaacccattgatatatgataatgcacctttaattgacagagatgcaacaaggctatacacccagagccataggaggcaccttgtggaatttgttacatggtccacaccccaactatatcacattttagctaagtccacagcactatctatgattgacctggtaacaaaatttgagaaggaccatatgaatgaaatttcagctctcataggggatgacgatatcaatagtttcataactgagtttctgctcatagagccaagattattcactatctacttgggccagtgtgcggccatcaattgggcatttgatgtacattatcatagaccatcagggaaatatcagatgggtgagctgttgtcatcgttcctttctagaatgagcaaaggagtgtttaaggtgcttgtcaatgctctaagccacccaaagatctacaagaaattctggcattgtggtattatagagcctatccatggtccttcacttgatgctcaaaacttgcacacaactgtgtgcaacatggtttacacatgctatatgacctacctcgacctgttgttgaatgaagagttagaagagttcacatttctcttgtgtgaaagcgacgaggatgtagtaccggacagattcgacaacatccaggcaaaacacttatgtgttctggcagatttgtactgtcaaccagggacctgcccaccaattcgaggtctaagaccggtagagaaatgtgcagttctaaccgaccatatcaaggcagaggctatgttatctccagcaggatcttcgtggaacataaatccaattattgtagaccattactcatgctctctgacttatctccggcgaggatcgatcaaacagataagattgagagttgatccaggattcattttcgacgccctcgctgaggtaaatgtcagtcagccaaagatcggcagcaacaacatctcaaatatgagcatcaaggctttcagacccccacacgatgatgttgcaaaattgctcaaagatatcaacacaagcaagcacaatcttcccatttcagggggcaatctcgccaattatgaaatccatgctttccgcagaatcgggttgaactcatctgcttgctacaaagctgttgagatatcaacattaattaggagatgccttgagccaggggaggacggcttgttcttgggtgagggatcgggttctatgttgatcacttataaagagatacttaaactaaacaagtgcttctataatagtggggtttccgccaattctagatctggtcaaagggaattagcaccctatccctccgaagttggccttgtcgaacacagaatgggagtaggtaatattgtcaaagtgctctttaacgggaggcccgaagtcacgtgggtaggcagtgtagattgcttcaatttcatagttagtaatatccctacctctagtgtggggtttatccattcagatatagagaccttgcctgacaaagatactatagagaagctagaggaattggcagccatcttatcgatggctctgctcctgggcaaaataggatcaatactggtgattaagcttatgcctttcagcggggattttgttcagggatttataagttatgtagggtctcattatagagaagtgaaccttgtataccctagatacagcaacttcatctctactgaatcttatttggttatgacagatctcaaggctaaccggctaatgaatcctgaaaagattaagcagcagataattgaatcatctgtgaggacttcacctggacttataggtcacatcctatccattaagcaactaagctgcatacaagcaattgtgggagacgcagttagtagaggtgatatcaatcctactctgaaaaaacttacacctatagagcaggtgctgatcaattgcgggttggcaattaacggacctaagctgtgcaaagaattgatccaccatgatgttgcctcagggcaagatggattgcttaattctatactcatcctctacagggagttggcaagattcaaagacaaccaaagaagtcaacaagggatgttccacgcttaccccgtattggtaagtagcaggcaacgagaacttatatctaggatcacccgcaaattctgggggcacattcttctttactccgggaacaaaaagttgataaataagtttatccagaatctcaagtccggctatctgatactagacttacaccagaatatcttcgttaagaatctatccaagtcagagaaacagattattatgacggggggtttgaaacgtgagtgggtttttaaggtaacagtcaaggagaccaaagaatggtataagttagtcggatacagtgccctgattaaggactaattggttgaactccggaaccctaatcctgccctaggtggttaggcattatttgcaatatattaaagaaaactttgaaaatacgaagtttctattcccagctttgtctggtggccggcatggtcccagcctcctcgctggcgccggctgggcaacattccgaggggaccgtcccctcggtaatggcgaatgggacgcggccgatccggctgctaacaaagcccgaaaggaagctgagttggctgctgccaccgctgagcaataactagcataaccccttggggcctctaaacgggtcttgaggggttttttgctgaaaggaggaactatatccggatgcggccgcgggccctatggtacccagcttttgttccctttagtgagggttaattccgagcttggcgtaatcatggtcatagctgtttcctgtgtgaaattgttatccgctcacaattccacacaacataggagccggaagcataaagtgtaaagcctggggtgcctaatgagtgaggtaactcacattaattgcgttgcgctcactgcccgctttccagtcgggaaacctgtcgtgccagctgcattaatgaatcggccaacgcgcggggagaggcggtttgcgtattgggcgctcttccgcttcctcgctcactgactcgctgcgctcggtcgttcggctgcggcgagcggtatcagctcactcaaaggcggtaatacggttatccacagaatcaggggataacgcaggaaagaacatgtgagcaaaaggccagcaaaaggccaggaaccgtaaaaaggccgcgttgctggcgtttttccataggctcggcccccctgacgagcatcacaaaaatcgacgctcaagtcagaggtggcgaaacccgacaggactataaagataccaggcgttcccccctggaagctccctcgtgcgctctcctgttccgaccctgccgcttaccggatacctgtccgcctttctcccttcgggaagcgtggcgctttctcaatgctcacgctgtaggtatctcagttcggtgtaggtcgttcgctccaagctgggctgtgtgcacgaaccccccgttcagcccgaccgctgcgccttatccggtaactatcgtcttgagtccaacccggtaagacacgacttatcgccactggcagcagccactggtaacaggattagcagagcgaggtatgtaggcggtgctacagagttcttgaagtggtggcctaactacggctacactagaaggacagtatttggtatctgcgctctgctgaagccagttaccttcggaaaaagagttggtagctcttgatccggcaaacaaaccaccgctggtagcggtggtttttttgtttgcaagcagcagattacgcgcagaaaaaaaggatctcaagaagatcctttgatcttttctacggggtctgacgctcagtggaacgaaaactcacgttaagggattttggtcatgagattatcaaaaaggatcttcacctagatccttttaaattaaaaatgaagttttaaatcaatctaaagtatatatgagtaaacttggtctgacagttaccaatgcttaatcagtgaggcacctatctcagcgatctgtctatttcgttcatccatagttgcctgactgcccgtcgtgtagataactacgatacgggagggcttaccatctggccccagtgctgcaatgataccgcgagacccacgctcaccggctccagatttatcagcaataaaccagccagccggaagggccgagcgcagaagtggtcctgcaactttatccgcctccatccagtctattaattgttgccgggaagctagagtaagtagttcgccagttaatagtttgcgcaacgttgttgccattgctacaggcatcgtggtgtcacgctcgtcgtttggtatggcttcattcagctccggttcccaacgatcaaggcgagttacatgatcccccatgttgtgaaaaaaagcggttagctccttcggtcctccgatcgttgtcagaagtaagttggccgcagtgttatcactcatgcttatggcagcactgcataattctcttactgtcatgccatccgtaagatgcttttctgtgactggtgagtactcaaccaagtcattctgagaatagtgtatgcggcgaccgagttgctcttgcccggcgtcaatacgggataataccgcgccacatagcagaactttaaaagtgctcatcattggaaaacgttcttcggggcgaaaactctcaaggatcttaccgctgttgagatccagttcgatgtaacccactcgtgcacccaactgatcttcagcatcttttactttcaccagcgtttctgggtgagcaaaaacaggaaggcaaaatgccgcaaaaaagggaataagggcgacacggaaatgttgaatactcatactcttcctttttcaatattattgaagcatttatcagggttattgtctcatgagcggatacatatttgaatgtatttagaaaaataaacaaataggggttccgcgcacatttccccgaaaagtgccacctgaaattgtaaacgttaatattttgttaaaattcgcgttaaatttttgttaaatcagctcattttttaaccaataggccgaaatcggcaaaatcccttataaatcaaaagaatagaccgagatagggttgagtgttgttccagtttggaacaagagtccactattaaagaacgtggactccaacgtcaaagggcgaaaaaccgtctatcagggcgatggcccactacgtgaaccatcaccctaatcaagttttttggggtcgaggtgccgtaaagcactaaatcggaaccctaaagggagcccccgatttagagcttgacggggaaagccggcgaacgtggcgagaaaggaagggaagaaagcgaaaggagcgggcgctagggcgctggcaagtgtagcggtcacgctgcgcgtaaccaccacacccgccgcgcttaatgcgccgctacagggcgcgtcccatt

SEQ ID NO: 147 - DNA, 20780 bp, Artificial sequence
  pTM2-S2-2P-dER_SARS-CoV-2 (optimized sequence)
tgtccgctaatacgactcactatagggccaactttgtttggtctgatgagtccgtgaggacgaaacccggagtcccgggtcaccaaacaaagttgggtaaggatagttcaatcaatgatcatcttctagtgcacttaggattcaagatcctattatcagggacaagagcaggattagggatatccgagatggccacacttttaaggagcttagcattgttcaaaagaaacaaggacaaaccacccattacatcaggatccggtggagccatcagaggaatcaaacacattattatagtaccaatccctggagattcctcaattaccactcgatccagacttctggaccggttggtgaggttaattggaaacccggatgtgagcgggcccaaactaacaggggcactaataggtatattatccttatttgtggagtctccaggtcaattgattcagaggatcaccgatgaccctgacgttagcataaggctgttagaggttgtccagagtgaccagtcacaatctggccttaccttcgcatcaagaggtaccaacatggaggatgaggcggaccaatacttttcacatgatgatccaattagtagtgatcaatccaggttcggatggttcgggaacaaggaaatctcagatattgaagtgcaagaccctgagggattcaacatgattctgggtaccatcctagcccaaatttgggtcttgctcgcaaaggcggttacggccccagacacggcagctgattcggagctaagaaggtggataaagtacacccaacaaagaagggtagttggtgaatttagattggagagaaaatggttggatgtggtgaggaacaggattgccgaggacctctccttacgccgattcatggtcgctctaatcctggatatcaagagaacacccggaaacaaacccaggattgctgaaatgatatgtgacattgatacatatatcgtagaggcaggattagccagttttatcctgactattaagtttgggatagaaactatgtatcctgctcttggactgcatgaatttgctggtgagttatccacacttgagtccttgatgaacctttaccagcaaatgggggaaactgcaccctacatggtaatcctggagaactcaattcagaacaagttcagtgcaggatcataccctctgctctggagctatgccatgggagtaggagtggaacttgaaaactccatgggaggtttgaactttggccgatcttactttgatccagcatattttagattagggcaagagatggtaaggaggtcagctggaaaggtcagttccacattggcatctgaactcggtatcactgccgaggatgcaaggcttgtttcagagattgcaatgcatactactgaggacaagatcagtagagcggttggacccagacaagcccaagtatcatttctacacggtgatcaaagtgagaatgagctaccgagattggggggcaaggaagataggagggtcaaacagagtcgaggagaagccagggagagctacagagaaaccgggcccagcagagcaagtgatgcgagagctgcccatcttccaaccggcacacccctagacattgacactgcaacggagtccagccaagatccgcaggacagtcgaaggtcagctgacgccctgcttaggctgcaagccatggcaggaatctcggaagaacaaggctcagacacggacacccctatagtgtacaatgacagaaatcttctagactaggtgcgagaggccgagggccagaacaacatccgcctaccatccatcattgttataaaaaacttaggaaccaggtccacacagccgccagcccatcaaccatccactcccacgattggagccaatggcagaagagcaggcacgccatgtcaaaaacggactggaatgcatccgggctctcaaggccgagcccatcggctcactggccatcgaggaagctatggcagcatggtcagaaatatcagacaacccaggacaggagcgagccacctgcagggaagagaaggcaggcagttcgggtctcagcaaaccatgcctctcagcaattggatcaactgaaggcggtgcacctcgcatccgcggtcagggacctggagagagcgatgacgacgctgaaactttgggaatccccccaagaaatctccaggcatcaagcactgggttacagtgttattacgtttatgatcacagcggtgaagcggttaagggaatccaagatgctgactctatcatggttcaatcaggccttgatggtgatagcaccctctcaggaggagacaatgaatctgaaaacagcgatgtggatattggcgaacctgataccgagggatatgctatcactgaccggggatctgctcccatctctatggggttcagggcttctgatgttgaaactgcagaaggaggggagatccacgagctcctgagactccaatccagaggcaacaactttccgaagcttgggaaaactctcaatgttcctccgcccccggaccccggtagggccagcacttccgggacacccattaaaaagggcacagacgcgagattagcctcatttggaacggagatcgcgtctttattgacaggtggtgcaacccaatgtgctcgaaagtcaccctcggaaccatcagggccaggtgcacctgcggggaatgtccccgagtgtgtgagcaatgccgcactgatacaggagtggacacccgaatctggtaccacaatctccccgagatcccagaataatgaagaagggggagactattatgatgatgagctgttctctgatgtccaagatattaaaacagccttggccaaaatacacgaggataatcagaagataatctccaagctagaatcactgctgttattgaagggagaagttgagtcaattaagaagcagatcaacaggcaaaatatcagcatatccaccctggaaggacacctctcaagcatcatgatcgccattcctggacttgggaaggatcccaacgaccccactgcagatgtcgaaatcaatcccgacttgaaacccatcataggcagagattcaggccgagcactggccgaagttctcaagaaacccgttgccagccgacaactccaaggaatgacaaatggacggaccagttccagaggacagctgctgaaggaatttcagctaaagccgatcgggaaaaagatgagctcagccgtcgggtttgttcctgacaccggccctgcatcacgcagtgtaatccgctccattataaaatccagccggctagaggaggatcggaagcgttacctgatgactctccttgatgatatcaaaggagccaatgatcttgccaagttccaccagatgctgatgaagataataatgaagtagctacagctcaacttacctgccaaccccatgccagtcgacccaactagcctaccctccatcattgttataaaaaacttaggaaccaggtccacacagccgccagcccatcaacgcgtacggccaccatgttcgtctttctggtattgcttcctctggtgagttcccagtgcgtagcaagtcagagtatcatagcctatactatgagcctgggggcagaaaattctgtcgcttatagtaataacagtattgcaattcctactaacttcactattagcgtgactacagaaattctgccagtgagcatgaccaagacctccgtcgactgtaccatgtatatctgcggagacagcacagaatgcagcaacctgcttctgcagtacggtagcttttgtacccagctgaacagggcactgaccggcatcgctgtggaacaggacaaaaatacgcaggaggtgttcgctcaggtcaagcagatttataagacacccccaataaaagacttcggcggctttaacttctcccagatcctgcccgatccgtcaaaaccttccaagagaagttttatcgaggatctgctgtttaacaaagtaacattggctgatgctggctttattaaacagtacggcgattgtctgggagatatcgccgctagagatctgatctgcgctcaaaaatttaatggcctcactgtattgccccccctgctgacggatgaaatgattgcccaatacacatcagccctgctggctgggacaatcacttccggctggacgttcggtgctggagctgctcttcaaattccatttgccatgcaaatggcttatagattcaacggaattggcgtgacccaaaacgtgctgtacgaaaatcaaaagctgattgctaatcagtttaactccgctatcggtaagatacaggacagcctgtctagtactgccagcgccctcggaaagctccaggatgtggtgaaccagaatgcgcaggcgctgaacacactcgtcaaacagcttagcagcaatttcggcgcaattagcagtgtactgaacgacatcttgtctcggctcgacccaccagaggccgaagtgcagattgatcgcctgatcactggccggctccagtctctgcagacctacgtaacccagcaactcatacgcgctgccgaaattcgggcttcagctaacctggccgcaacaaagatgtctgaatgtgttcttgggcagtccaagagggtggacttctgcgggaaaggatatcacctgatgtccttccctcagagcgcccctcatggagtggtgtttcttcatgttacctatgttccggcccaggaaaagaattttaccactgccccagccatttgccatgatggtaaagcacacttcccaagagagggcgtgtttgttagtaacggcacccactggttcgttacccagcgcaatttttacgaacctcaaatcattaccactgacaatacatttgtatcaggcaattgcgacgtggtgatcggaatcgtaaataatacagtctacgatcccctgcagccagagcttgacagctttaaagaggaactggacaaatacttcaaaaatcatacaagccccgacgtcgacctgggagatatttctggcatcaatgcctccgtcgtgaatatccaaaaagagatcgaccgccttaatgaggttgccaaaaacctcaacgagtccctgattgatctgcaggagctggggaagtacgagcagtatatcaaatggccctggtacatctggctgggcttcattgccgggctcatagccatcgtgatggtgacgatcatgctgtgttgcatgacctcttgctgttcttgtctgaaggggtgctgctcttgtgggagttgttgtaaattcgatgaggatgattccgaataagcgcgcagcgcttagacgtctcgcgatcgatactagtacaacctaaatccattataaaaaacttaggagcaaagtgattgcctcccaaggtccacaatgacagagacctacgacttcgacaagtcggcatgggacatcaaagggtcgatcgctccgatacaacccaccacctacagtgatggcaggctggtgccccaggtcagagtcatagatcctggtctaggcgacaggaaggatgaatgctttatgtacatgtttctgctgggggttgttgaggacagcgattccctagggcctccaatcgggcgagcatttgggttcctgcccttaggtgttggcagatccacagcaaagcccgaaaaactcctcaaagaggccactgagcttgacatagttgttagacgtacagcagggctcaatgaaaaactggtgttctacaacaacaccccactaactctcctcacaccttggagaaaggtcctaacaacagggagtgtcttcaacgcaaaccaagtgtgcaatgcggttaatctgataccgctcgataccccgcagaggttccgtgttgtttatatgagcatcacccgtctttcggataacgggtattacaccgttcctagaagaatgctggaattcagatcggtcaatgcagtggccttcaacctgctggtgacccttaggattgacaaggcgataggccctgggaagatcatcgacaatacagagcaacttcctgaggcaacatttatggtccacatcgggaacttcaggagaaagaagagtgaagtctactctgccgattattgcaaaatgaaaatcgaaaagatgggcctggtttttgcacttggtgggatagggggcaccagtcttcacattagaagcacaggcaaaatgagcaagactctccatgcacaactcgggttcaagaagaccttatgttacccgctgatggatatcaatgaagaccttaatcgattactctggaggagcagatgcaagatagtaagaatccaggcagttttgcagccatcagttcctcaagaattccgcatttacgacgacgtgatcataaatgatgaccaaggactattcaaagttctgtagaccgtagtgcccagcaatgcccgaaaacgacccccctcacaatgacagccagaaggcccggacaaaaaagccccctccgaaagactccacggaccaagcgagaggccagccagcagccgacggcaagcgcgaacaccaggcggccccagcacagaacagccctgacacaaggccaccaccagccaccccaatctgcatcctcctcgtgggacccccgaggaccaacccccaaggctgcccccgatccaaaccaccaaccgcatccccaccacccccgggaaagaaacccccagcaattggaaggcccctccccctcttcctcaacacaagaactccacaaccgaaccgcacaagcgaccgaggtgacccaaccgcaggcatccgactccctagacagatcctctctccccggcaaactaaacaaaacttagggccaaggaacatacacacccaacagaacccagaccccggcccacggcgccgcgcccccaacccccgacaaccagagggagcccccaaccaatcccgccggctcccccggtgcccacaggcagggacaccaacccccgaacagacccagcacccaaccatcgacaatccaagacgggggggcccccccaaaaaaaggcccccaggggccgacagccagcaccgcgaggaagcccacccaccccacacacgaccacggcaaccaaaccagaacccagaccaccctgggccaccagctcccagactcggccatcaccccgcagaaaggaaaggccacaacccgcgcaccccagccccgatccggcggggagccacccaacccgaaccagcacccaagagcgatccccgaaggacccccgaaccgcaaaggacatcagtatcccacagcctctccaagtcccccggtctcctcctcttctcgaagggaccaaaagatcaatccaccacacccgacgacactcaactccccacccctaaaggagacaccgggaatcccagaatcaagactcatccaatgtccatcatgggtctcaaggtgaacgtctctgccatattcatggcagtactgttaactctccaaacacccaccggtcaaatccattggggcaatctctctaagataggggtggtaggaataggaagtgcaagctacaaagttatgactcgttccagccatcaatcattagtcataaaattaatgcccaatataactctcctcaataactgcacgagggtagagattgcagaatacaggagactactgagaacagttttggaaccaattagagatgcacttaatgcaatgacccagaatataagaccggttcagagtgtagcttcaagtaggagacacaagagatttgcgggagtagtcctggcaggtgcggccctaggcgttgccacagctgctcagataacagccggcattgcacttcaccagtccatgctgaactctcaagccatcgacaatctgagagcgagcctggaaactactaatcaggcaattgagacaatcagacaagcagggcaggagatgatattggctgttcagggtgtccaagactacatcaataatgagctgataccgtctatgaaccaactatcttgtgatttaatcggccagaagctcgggctcaaattgctcagatactatacagaaatcctgtcattatttggccccagtttacgggaccccatatctgcggagatatctatccaggctttgagctatgcgcttggaggagacatcaataaggtgttagaaaagctcggatacagtggaggtgatttactgggcatcttagagagcggaggaataaaggcccggataactcacgtcgacacagagtcctacttcattgtcctcagtatagcctatccgacgctgtccgagattaagggggtgattgtccaccggctagagggggtctcgtacaacataggctctcaagagtggtataccactgtgcccaagtatgttgcaacccaagggtaccttatctcgaattttgatgagtcatcgtgtactttcatgccagaggggactgtgtgcagccaaaatgccttgtacccgatgagtcctctgctccaagaatgcctccgggggtacaccaagtcctgtgctcgtacactcgtatccgggtcttttgggaaccggttcattttatcacaagggaacctaatagccaattgtgcatcaatcctttgcaagtgttacacaacaggaacgatcattaatcaagaccctgacaagatcctaacatacattgctgccgatcactgcccggtagtcgaggtgaacggcgtgaccatccaagtcgggagcaggaggtatccagacgctgtgtacttgcacagaattgacctcggtcctcccatatcattggagaggttggacgtagggacaaatctggggaatgcaattgctaagttggaggatgccaaggaattgttggagtcatcggaccagatattgaggagtatgaaaggtttatcgagcactagcatagtctacatcctgattgcagtgtgtcttggagggttgatagggatccccgctttaatatgttgctgcagggggcgttgtaacaaaaagggagaacaagttggtatgtcaagaccaggcctaaagcctgatcttacgggaacatcaaaatcctatgtaaggtcgctctgatcctctacaactcttgaaacacaaatgtcccacaagtctcctcttcgtcatcaagcaaccaccgcacccagcatcaagcccacctgaaattatctccggcttccctctggccgaacaatatcggtagttaatcaaaacttagggtgcaagatcatccacaatgtcaccacaacgagaccggataaatgccttctacaaagataacccccatcccaagggaagtaggatagtcattaacagagaacatcttatgattgatagaccttatgttttgctggctgttctgtttgtcatgtttctgagcttgatcgggttgctagccattgcaggcattagacttcatcgggcagccatctacaccgcagagatccataaaagcctcagcaccaatctagatgtaactaactcaatcgagcatcaggtcaaggacgtgctgacaccactcttcaaaatcatcggtgatgaagtgggcctgaggacacctcagagattcactgacctagtgaaattaatctctgacaagattaaattccttaatccggatagggagtacgacttcagagatctcacttggtgtatcaacccgccagagagaatcaaattggattatgatcaatactgtgcagatgtggctgctgaagagctcatgaatgcattggtgaactcaactctactggagaccagaacaaccaatcagttcctagctgtctcaaagggaaactgctcagggcccactacaatcagaggtcaattctcaaacatgtcgctgtccctgttagacttgtatttaggtcgaggttacaatgtgtcatctatagtcactatgacatcccagggaatgtatgggggaacttacctagtggaaaagcctaatctgagcagcaaaaggtcagagttgtcacaactgagcatgtaccgagtgtttgaagtaggtgttatcagaaatccgggtttgggggctccggtgttccatatgacaaactatcttgagcaaccagtcagtaatgatctcagcaactgtatggtggctttgggggagctcaaactcgcagccctttgtcacggggaagattctatcacaattccctatcagggatcagggaaaggtgtcagcttccagctcgtcaagctaggtgtctggaaatccccaaccgacatgcaatcctgggtccccttatcaacggatgatccagtgatagacaggctttacctctcatctcacagaggtgttatcgctgacaatcaagcaaaatgggctgtcccgacaacacgaacagatgacaagttgcgaatggagacatgcttccaacaggcgtgtaagggtaaaatccaagcactctgcgagaatcccgagtgggcaccattgaaggataacaggattccttcatacggggtcttgtctgttgatctgagtctgacagttgagcttaaaatcaaaattgcttcgggattcgggccattgatcacacacggttcagggatggacctatacaaatccaaccacaacaatgtgtattggctgactatcccgccaatgaagaacctagccttaggtgtaatcaacacattggagtggataccgagattcaaggttagtccctacctcttcactgtcccaattaaggaagcaggcgaagactgccatgccccaacatacctacctgcggaggtggatggtgatgtcaaactcagttccaatctggtgattctacctggtcaagatctccaatatgttttggcaacctacgatacttccagggttgaacatgctgtggtttattacgtttacagcccaagccgctcattttcttacttttatccttttaggttgcctataaagggggtccccatcgaattacaagtggaatgcttcacatgggaccaaaaactctggtgccgtcacttctgtgtgcttgcggactcagaatctggtggacatatcactcactctgggatggtgggcatgggagtcagctgcacagtcacccgggaagatggaaccaatcgcagatagggctgctagtgaaccaatcacatgatgtcacccagacatcaggcatacccactagtgtgaaatagacatcagaattaagaaaaacgtagggtccaagtggttccccgttatggactcgctatctgtcaaccagatcttataccctgaagttcacctagatagcccgatagttaccaataagatagtagccatcctggagtatgctcgagtccctcacgcttacagcctggaggaccctacactgtgtcagaacatcaagcaccgcctaaaaaacggattttccaaccaaatgattataaacaatgtggaagttgggaatgtcatcaagtccaagcttaggagttatccggcccactctcatattccatatccaaattgtaatcaggatttatttaacatagaagacaaagagtcaacgaggaagatccgtgaactcctcaaaaaggggaattcgctgtactccaaagtcagtgataaggttttccaatgcttaagggacactaactcacggcttggcctaggctccgaattgagggaggacatcaaggagaaagttattaacttgggagtttacatgcacagctcccagtggtttgagccctttctgttttggtttacagtcaagactgagatgaggtcagtgattaaatcacaaacccatacttgccataggaggagacacacacctgtattcttcactggtagttcagttgagttgctaatctctcgtgaccttgttgctataatcagtaaagagtctcaacatgtatattacctgacatttgaactggttttgatgtattgtgatgtcatagaggggaggttaatgacagagaccgctatgactattgatgctaggtatacagagcttctaggaagagtcagatacatgtggaaactgatagatggtttcttccctgcactcgggaatccaacttatcaaattgtagccatgctggagcctctttcacttgcttacctgcagctgagggatataacagtagaactcagaggtgctttccttaaccactgctttactgaaatacatgatgttcttgaccaaaacgggttttctgatgaaggtacttatcatgagttaactgaagctctagattacattttcataactgatgacatacatctgacaggggagattttctcatttttcagaagtttcggccaccccagacttgaagcagtaacggctgctgaaaatgttaggaaatacatgaatcagcctaaagtcattgtgtatgagactctgatgaaaggtcatgccatattttgtggaatcataatcaacggctatcgtgacaggcacggaggcagttggccaccgctgaccctccccctgcatgctgcagacacaatccggaatgctcaagcttcaggtgaagggttaacacatgagcagtgcgttgataactggaaatcttttgctggagtgaaatttggctgctttatgcctcttagcctggatagtgatctgacaatgtacctaaaggacaaggcacttgctgctctccaaagggaatgggattcagtttacccgaaagagttcctgcgttacgaccctcccaagggaaccgggtcacggaggcttgtagatgttttccttaatgattcgagctttgacccatatgatgtgataatgtatgttgtaagtggagcttacctccatgaccctgagttcaacctgtcttacagcctgaaagaaaaggagatcaaggaaacaggtagactttttgctaaaatgacttacaaaatgagggcatgccaagtgattgctgaaaatctaatctcaaacgggattggcaaatattttaaggacaatgggatggccaaggatgagcacgatttgactaaggcactccacactctagctgtctcaggagtccccaaagatctcaaagaaagtcacaggggggggccagtcttaaaaacctactcccgaagcccagtccacacaagtaccaggaacgtgagagcagcaaaagggtttatagggttccctcaagtaattcggcaggaccaagacactgatcatccggagaatatggaagcttacgagacagtcagtgcatttatcacgactgatctcaagaagtactgccttaattggagatatgagaccatcagcttgtttgcacagaggctaaatgagatttacggattgccctcatttttccagtggctgcataagaggcttgagacctctgtcctgtatgtaagtgaccctcattgcccccccgaccttgacgcccatatcccgttatataaagtccccaatgatcaaatcttcattaagtaccctatgggaggtatagaagggtattgtcagaagctgtggaccatcagcaccattccctatctatacctggctgcttatgagagcggagtaaggattgcttcgttagtgcaaggggacaatcagaccatagccgtaacaaaaagggtacccagcacatggccctacaaccttaagaaacgggaagctgctagagtaactagagattactttgtaattcttaggcaaaggctacatgatattggccatcacctcaaggcaaatgagacaattgtttcatcacatttttttgtctattcaaaaggaatatattatgatgggctacttgtgtcccaatcactcaagagcatcgcaagatgtgtattctggtcagagactatagttgatgaaacaagggcagcatgcagtaatattgctacaacaatggctaaaagcatcgagagaggttatgaccgttaccttgcatattccctgaacgtcctaaaagtgatacagcaaattctgatctctcttggcttcacaatcaattcaaccatgacccgggatgtagtcatacccctcctcacaaacaacgacctcttaataaggatggcactgttgcccgctcctattggggggatgaattatctgaatatgagcaggctgtttgtcagaaacatcggtgatccagtaacatcatcaattgctgatctcaagagaatgattctcgcctcactaatgcctgaagagaccctccatcaagtaatgacacaacaaccgggggactcttcattcctagactgggctagcgacccttactcagcaaatcttgtatgtgtccagagcatcactagactcctcaagaacataactgcaaggtttgtcctgatccatagtccaaacccaatgttaaaaggattattccatgatgacagtaaagaagaggacgagggactggcggcattcctcatggacaggcatattatagtacctagggcagctcatgaaatcctggatcatagtgtcacaggggcaagagagtctattgcaggcatgctggataccacaaaaggcttgattcgagccagcatgaggaagggggggttaacctctcgagtgataaccagattgtccaattatgactatgaacaattcagagcagggatggtgctattgacaggaagaaagagaaatgtcctcattgacaaagagtcatgttcagtgcagctggcgagagctctaagaagccatatgtgggcgaggctagctcgaggacggcctatttacggccttgaggtccctgatgtactagaatctatgcgaggccaccttattcggcgtcatgagacatgtgtcatctgcgagtgtggatcagtcaactacggatggttttttgtcccctcgggttgccaactggatgatattgacaaggaaacatcatccttgagagtcccatatattggttctaccactgatgagagaacagacatgaagcttgccttcgtaagagccccaagtcgatccttgcgatctgctgttagaatagcaacagtgtactcatgggcttacggtgatgatgatagctcttggaacgaagcctggttgttggctaggcaaagggccaatgtgagcctggaggagctaagggtgatcactcccatctcaacttcgactaatttagcgcataggttgagggatcgtagcactcaagtgaaatactcaggtacatcccttgtccgagtggcgaggtataccacaatctccaacgacaatctctcatttgtcatatcagataagaaggttgatactaactttatataccaacaaggaatgcttctagggttgggtgttttagaaacattgtttcgactcgagaaagataccggatcatctaacacggtattacatcttcacgtcgaaacagattgttgcgtgatcccgatgatagatcatcccaggatacccagctcccgcaagctagagctgagggcagagctatgtaccaacccattgatatatgataatgcacctttaattgacagagatgcaacaaggctatacacccagagccataggaggcaccttgtggaatttgttacatggtccacaccccaactatatcacattttagctaagtccacagcactatctatgattgacctggtaacaaaatttgagaaggaccatatgaatgaaatttcagctctcataggggatgacgatatcaatagtttcataactgagtttctgctcatagagccaagattattcactatctacttgggccagtgtgcggccatcaattgggcatttgatgtacattatcatagaccatcagggaaatatcagatgggtgagctgttgtcatcgttcctttctagaatgagcaaaggagtgtttaaggtgcttgtcaatgctctaagccacccaaagatctacaagaaattctggcattgtggtattatagagcctatccatggtccttcacttgatgctcaaaacttgcacacaactgtgtgcaacatggtttacacatgctatatgacctacctcgacctgttgttgaatgaagagttagaagagttcacatttctcttgtgtgaaagcgacgaggatgtagtaccggacagattcgacaacatccaggcaaaacacttatgtgttctggcagatttgtactgtcaaccagggacctgcccaccaattcgaggtctaagaccggtagagaaatgtgcagttctaaccgaccatatcaaggcagaggctatgttatctccagcaggatcttcgtggaacataaatccaattattgtagaccattactcatgctctctgacttatctccggcgaggatcgatcaaacagataagattgagagttgatccaggattcattttcgacgccctcgctgaggtaaatgtcagtcagccaaagatcggcagcaacaacatctcaaatatgagcatcaaggctttcagacccccacacgatgatgttgcaaaattgctcaaagatatcaacacaagcaagcacaatcttcccatttcagggggcaatctcgccaattatgaaatccatgctttccgcagaatcgggttgaactcatctgcttgctacaaagctgttgagatatcaacattaattaggagatgccttgagccaggggaggacggcttgttcttgggtgagggatcgggttctatgttgatcacttataaagagatacttaaactaaacaagtgcttctataatagtggggtttccgccaattctagatctggtcaaagggaattagcaccctatccctccgaagttggccttgtcgaacacagaatgggagtaggtaatattgtcaaagtgctctttaacgggaggcccgaagtcacgtgggtaggcagtgtagattgcttcaatttcatagttagtaatatccctacctctagtgtggggtttatccattcagatatagagaccttgcctgacaaagatactatagagaagctagaggaattggcagccatcttatcgatggctctgctcctgggcaaaataggatcaatactggtgattaagcttatgcctttcagcggggattttgttcagggatttataagttatgtagggtctcattatagagaagtgaaccttgtataccctagatacagcaacttcatctctactgaatcttatttggttatgacagatctcaaggctaaccggctaatgaatcctgaaaagattaagcagcagataattgaatcatctgtgaggacttcacctggacttataggtcacatcctatccattaagcaactaagctgcatacaagcaattgtgggagacgcagttagtagaggtgatatcaatcctactctgaaaaaacttacacctatagagcaggtgctgatcaattgcgggttggcaattaacggacctaagctgtgcaaagaattgatccaccatgatgttgcctcagggcaagatggattgcttaattctatactcatcctctacagggagttggcaagattcaaagacaaccaaagaagtcaacaagggatgttccacgcttaccccgtattggtaagtagcaggcaacgagaacttatatctaggatcacccgcaaattctgggggcacattcttctttactccgggaacaaaaagttgataaataagtttatccagaatctcaagtccggctatctgatactagacttacaccagaatatcttcgttaagaatctatccaagtcagagaaacagattattatgacggggggtttgaaacgtgagtgggtttttaaggtaacagtcaaggagaccaaagaatggtataagttagtcggatacagtgccctgattaaggactaattggttgaactccggaaccctaatcctgccctaggtggttaggcattatttgcaatatattaaagaaaactttgaaaatacgaagtttctattcccagctttgtctggtggccggcatggtcccagcctcctcgctggcgccggctgggcaacattccgaggggaccgtcccctcggtaatggcgaatgggacgcggccgatccggctgctaacaaagcccgaaaggaagctgagttggctgctgccaccgctgagcaataactagcataaccccttggggcctctaaacgggtcttgaggggttttttgctgaaaggaggaactatatccggatgcggccgcgggccctatggtacccagcttttgttccctttagtgagggttaattccgagcttggcgtaatcatggtcatagctgtttcctgtgtgaaattgttatccgctcacaattccacacaacataggagccggaagcataaagtgtaaagcctggggtgcctaatgagtgaggtaactcacattaattgcgttgcgctcactgcccgctttccagtcgggaaacctgtcgtgccagctgcattaatgaatcggccaacgcgcggggagaggcggtttgcgtattgggcgctcttccgcttcctcgctcactgactcgctgcgctcggtcgttcggctgcggcgagcggtatcagctcactcaaaggcggtaatacggttatccacagaatcaggggataacgcaggaaagaacatgtgagcaaaaggccagcaaaaggccaggaaccgtaaaaaggccgcgttgctggcgtttttccataggctcggcccccctgacgagcatcacaaaaatcgacgctcaagtcagaggtggcgaaacccgacaggactataaagataccaggcgttcccccctggaagctccctcgtgcgctctcctgttccgaccctgccgcttaccggatacctgtccgcctttctcccttcgggaagcgtggcgctttctcaatgctcacgctgtaggtatctcagttcggtgtaggtcgttcgctccaagctgggctgtgtgcacgaaccccccgttcagcccgaccgctgcgccttatccggtaactatcgtcttgagtccaacccggtaagacacgacttatcgccactggcagcagccactggtaacaggattagcagagcgaggtatgtaggcggtgctacagagttcttgaagtggtggcctaactacggctacactagaaggacagtatttggtatctgcgctctgctgaagccagttaccttcggaaaaagagttggtagctcttgatccggcaaacaaaccaccgctggtagcggtggtttttttgtttgcaagcagcagattacgcgcagaaaaaaaggatctcaagaagatcctttgatcttttctacggggtctgacgctcagtggaacgaaaactcacgttaagggattttggtcatgagattatcaaaaaggatcttcacctagatccttttaaattaaaaatgaagttttaaatcaatctaaagtatatatgagtaaacttggtctgacagttaccaatgcttaatcagtgaggcacctatctcagcgatctgtctatttcgttcatccatagttgcctgactgcccgtcgtgtagataactacgatacgggagggcttaccatctggccccagtgctgcaatgataccgcgagacccacgctcaccggctccagatttatcagcaataaaccagccagccggaagggccgagcgcagaagtggtcctgcaactttatccgcctccatccagtctattaattgttgccgggaagctagagtaagtagttcgccagttaatagtttgcgcaacgttgttgccattgctacaggcatcgtggtgtcacgctcgtcgtttggtatggcttcattcagctccggttcccaacgatcaaggcgagttacatgatcccccatgttgtgaaaaaaagcggttagctccttcggtcctccgatcgttgtcagaagtaagttggccgcagtgttatcactcatgcttatggcagcactgcataattctcttactgtcatgccatccgtaagatgcttttctgtgactggtgagtactcaaccaagtcattctgagaatagtgtatgcggcgaccgagttgctcttgcccggcgtcaatacgggataataccgcgccacatagcagaactttaaaagtgctcatcattggaaaacgttcttcggggcgaaaactctcaaggatcttaccgctgttgagatccagttcgatgtaacccactcgtgcacccaactgatcttcagcatcttttactttcaccagcgtttctgggtgagcaaaaacaggaaggcaaaatgccgcaaaaaagggaataagggcgacacggaaatgttgaatactcatactcttcctttttcaatattattgaagcatttatcagggttattgtctcatgagcggatacatatttgaatgtatttagaaaaataaacaaataggggttccgcgcacatttccccgaaaagtgccacctgaaattgtaaacgttaatattttgttaaaattcgcgttaaatttttgttaaatcagctcattttttaaccaataggccgaaatcggcaaaatcccttataaatcaaaagaatagaccgagatagggttgagtgttgttccagtttggaacaagagtccactattaaagaacgtggactccaacgtcaaagggcgaaaaaccgtctatcagggcgatggcccactacgtgaaccatcaccctaatcaagttttttggggtcgaggtgccgtaaagcactaaatcggaaccctaaagggagcccccgatttagagcttgacggggaaagccggcgaacgtggcgagaaaggaagggaagaaagcgaaaggagcgggcgctagggcgctggcaagtgtagcggtcacgctgcgcgtaaccaccacacccgccgcgcttaatgcgccgctacagggcgcgtcccatt

SEQ ID NO: 148 - DNA, 22826 bp, Artificial sequence
  pTM2-SF-2P-2a_SARS-CoV-2 (optimized sequence)
tgtccgctaatacgactcactatagggccaactttgtttggtctgatgagtccgtgaggacgaaacccggagtcccgggtcaccaaacaaagttgggtaaggatagttcaatcaatgatcatcttctagtgcacttaggattcaagatcctattatcagggacaagagcaggattagggatatccgagatggccacacttttaaggagcttagcattgttcaaaagaaacaaggacaaaccacccattacatcaggatccggtggagccatcagaggaatcaaacacattattatagtaccaatccctggagattcctcaattaccactcgatccagacttctggaccggttggtgaggttaattggaaacccggatgtgagcgggcccaaactaacaggggcactaataggtatattatccttatttgtggagtctccaggtcaattgattcagaggatcaccgatgaccctgacgttagcataaggctgttagaggttgtccagagtgaccagtcacaatctggccttaccttcgcatcaagaggtaccaacatggaggatgaggcggaccaatacttttcacatgatgatccaattagtagtgatcaatccaggttcggatggttcgggaacaaggaaatctcagatattgaagtgcaagaccctgagggattcaacatgattctgggtaccatcctagcccaaatttgggtcttgctcgcaaaggcggttacggccccagacacggcagctgattcggagctaagaaggtggataaagtacacccaacaaagaagggtagttggtgaatttagattggagagaaaatggttggatgtggtgaggaacaggattgccgaggacctctccttacgccgattcatggtcgctctaatcctggatatcaagagaacacccggaaacaaacccaggattgctgaaatgatatgtgacattgatacatatatcgtagaggcaggattagccagttttatcctgactattaagtttgggatagaaactatgtatcctgctcttggactgcatgaatttgctggtgagttatccacacttgagtccttgatgaacctttaccagcaaatgggggaaactgcaccctacatggtaatcctggagaactcaattcagaacaagttcagtgcaggatcataccctctgctctggagctatgccatgggagtaggagtggaacttgaaaactccatgggaggtttgaactttggccgatcttactttgatccagcatattttagattagggcaagagatggtaaggaggtcagctggaaaggtcagttccacattggcatctgaactcggtatcactgccgaggatgcaaggcttgtttcagagattgcaatgcatactactgaggacaagatcagtagagcggttggacccagacaagcccaagtatcatttctacacggtgatcaaagtgagaatgagctaccgagattggggggcaaggaagataggagggtcaaacagagtcgaggagaagccagggagagctacagagaaaccgggcccagcagagcaagtgatgcgagagctgcccatcttccaaccggcacacccctagacattgacactgcaacggagtccagccaagatccgcaggacagtcgaaggtcagctgacgccctgcttaggctgcaagccatggcaggaatctcggaagaacaaggctcagacacggacacccctatagtgtacaatgacagaaatcttctagactaggtgcgagaggccgagggccagaacaacatccgcctaccatccatcattgttataaaaaacttaggaaccaggtccacacagccgccagcccatcaaccatccactcccacgattggagccaatggcagaagagcaggcacgccatgtcaaaaacggactggaatgcatccgggctctcaaggccgagcccatcggctcactggccatcgaggaagctatggcagcatggtcagaaatatcagacaacccaggacaggagcgagccacctgcagggaagagaaggcaggcagttcgggtctcagcaaaccatgcctctcagcaattggatcaactgaaggcggtgcacctcgcatccgcggtcagggacctggagagagcgatgacgacgctgaaactttgggaatccccccaagaaatctccaggcatcaagcactgggttacagtgttattacgtttatgatcacagcggtgaagcggttaagggaatccaagatgctgactctatcatggttcaatcaggccttgatggtgatagcaccctctcaggaggagacaatgaatctgaaaacagcgatgtggatattggcgaacctgataccgagggatatgctatcactgaccggggatctgctcccatctctatggggttcagggcttctgatgttgaaactgcagaaggaggggagatccacgagctcctgagactccaatccagaggcaacaactttccgaagcttgggaaaactctcaatgttcctccgcccccggaccccggtagggccagcacttccgggacacccattaaaaagggcacagacgcgagattagcctcatttggaacggagatcgcgtctttattgacaggtggtgcaacccaatgtgctcgaaagtcaccctcggaaccatcagggccaggtgcacctgcggggaatgtccccgagtgtgtgagcaatgccgcactgatacaggagtggacacccgaatctggtaccacaatctccccgagatcccagaataatgaagaagggggagactattatgatgatgagctgttctctgatgtccaagatattaaaacagccttggccaaaatacacgaggataatcagaagataatctccaagctagaatcactgctgttattgaagggagaagttgagtcaattaagaagcagatcaacaggcaaaatatcagcatatccaccctggaaggacacctctcaagcatcatgatcgccattcctggacttgggaaggatcccaacgaccccactgcagatgtcgaaatcaatcccgacttgaaacccatcataggcagagattcaggccgagcactggccgaagttctcaagaaacccgttgccagccgacaactccaaggaatgacaaatggacggaccagttccagaggacagctgctgaaggaatttcagctaaagccgatcgggaaaaagatgagctcagccgtcgggtttgttcctgacaccggccctgcatcacgcagtgtaatccgctccattataaaatccagccggctagaggaggatcggaagcgttacctgatgactctccttgatgatatcaaaggagccaatgatcttgccaagttccaccagatgctgatgaagataataatgaagtagctacagctcaacttacctgccaaccccatgccagtcgacccaactagcctaccctccatcattgttataaaaaacttaggaaccaggtccacacagccgccagcccatcaacgcgtacggccaccatgttcgtctttctggtattgcttcctctggtgagttcccagtgcgtgaacctgacgactcggacacagctgccgcctgcatacacaaacagcttcacacgaggtgtttactatccggacaaggtgttccggtcctctgtcttgcacagtactcaggacctttttctgccattctttagtaacgtaacatggttccacgctatccatgtaagtggaaccaatggcaccaagcgcttcgacaatccagtcctgcctttcaacgatggcgtctacttcgcctctaccgagaaatcaaatattattagagggtggatcttcgggaccacccttgatagcaagactcagagtcttctgatcgtgaacaatgctactaacgtcgtcataaaagtatgtgaatttcagttctgcaatgaccccttcctgggcgtgtactatcacaaaaataacaagtcctggatggaatccgagtttcgggtatacagcagcgctaataactgtaccttcgaatatgtgagccagccattcctgatggacctggaggggaagcagggcaacttcaaaaacctgagggaattcgtgttcaagaacattgacggatacttcaaaatctacagcaagcacactccaattaatcttgttagggaccttcctcaggggttctccgcgctggaacccttggtggatctgccaattggtattaacatcacgaggtttcaaaccctgctcgccctccaccggtcatacctgaccccaggtgatagtagtagtggctggacagcaggggccgcagcatactacgtcggctacctccagccccgcacattcctgctgaagtataatgaaaacggtactattacagatgctgtggactgcgcacttgatccattgtccgagactaaatgcaccttgaagtcttttaccgttgagaagggaatctatcagaccagtaatttcagagtgcaacccaccgagagcatcgtgcgatttcctaatattacaaacctgtgcccttttggcgaggtgtttaacgccactcgcttcgcgagcgtgtatgcatggaaccggaaaaggattagcaactgcgtggctgattattcagtcctttataatagtgcctctttcagtacgttcaaatgctatggagtgtccccaactaagcttaacgatctgtgttttaccaacgtgtatgccgactctttcgtcatcaggggcgacgaggttagacaaattgcgcccggacagacaggcaaaattgctgactacaattataaactgccagatgactttacaggatgcgtgattgcctggaacagcaacaaccttgattctaaggtgggcggaaactacaactatctgtacaggctgttccgcaaatcaaacctgaagccattcgaaagggacatttcaactgagatctaccaggccggatctacaccttgcaacggggtggaaggattcaactgctacttcccgctccagtcatatggctttcaacctaccaatggagtgggctaccaaccttatcgagtagttgttctctctttcgagttgttgcatgccccagccactgtctgcggaccaaagaaatccaccaatctggtgaaaaacaagtgcgtcaacttcaacttcaatggactcaccggtacaggggttcttaccgagtcaaacaagaaattccttccgtttcagcagtttggacgcgatatcgccgacactacggatgcagtacgcgatcctcagacacttgagatcctggacatcactccatgctcttttggaggggtgtctgtcatcactcccgggacgaataccagtaatcaggtcgccgtgctctatcaagatgtcaactgcacagaggtgccagtcgccattcacgccgatcagcttacccctacttggcgagtatatagcacagggtccaacgtgtttcagacaagggcgggttgtctgatcggcgctgagcacgtcaataatagctacgaatgtgacatccctattggagccgggatttgcgctagctatcagactcagactaactcaccccggcgagctaggtctgtagcaagtcagagtatcatagcctatactatgagcctgggggcagaaaattctgtcgcttatagtaataacagtattgcaattcctactaacttcactattagcgtgactacagaaattctgccagtgagcatgaccaagacctccgtcgactgtaccatgtatatctgcggagacagcacagaatgcagcaacctgcttctgcagtacggtagcttttgtacccagctgaacagggcactgaccggcatcgctgtggaacaggacaaaaatacgcaggaggtgttcgctcaggtcaagcagatttataagacacccccaataaaagacttcggcggctttaacttctcccagatcctgcccgatccgtcaaaaccttccaagagaagttttatcgaggatctgctgtttaacaaagtaacattggctgatgctggctttattaaacagtacggcgattgtctgggagatatcgccgctagagatctgatctgcgctcaaaaatttaatggcctcactgtattgccccccctgctgacggatgaaatgattgcccaatacacatcagccctgctggctgggacaatcacttccggctggacgttcggtgctggagctgctcttcaaattccatttgccatgcaaatggcttatagattcaacggaattggcgtgacccaaaacgtgctgtacgaaaatcaaaagctgattgctaatcagtttaactccgctatcggtaagatacaggacagcctgtctagtactgccagcgccctcggaaagctccaggatgtggtgaaccagaatgcgcaggcgctgaacacactcgtcaaacagcttagcagcaatttcggcgcaattagcagtgtactgaacgacatcttgtctcggctcgacccaccagaggccgaagtgcagattgatcgcctgatcactggccggctccagtctctgcagacctacgtaacccagcaactcatacgcgctgccgaaattcgggcttcagctaacctggccgcaacaaagatgtctgaatgtgttcttgggcagtccaagagggtggacttctgcgggaaaggatatcacctgatgtccttccctcagagcgcccctcatggagtggtgtttcttcatgttacctatgttccggcccaggaaaagaattttaccactgccccagccatttgccatgatggtaaagcacacttcccaagagagggcgtgtttgttagtaacggcacccactggttcgttacccagcgcaatttttacgaacctcaaatcattaccactgacaatacatttgtatcaggcaattgcgacgtggtgatcggaatcgtaaataatacagtctacgatcccctgcagccagagcttgacagctttaaagaggaactggacaaatacttcaaaaatcatacaagccccgacgtcgacctgggagatatttctggcatcaatgcctccgtcgtgaatatccaaaaagagatcgaccgccttaatgaggttgccaaaaacctcaacgagtccctgattgatctgcaggagctggggaagtacgagcagtatatcaaatggccctggtacatctggctgggcttcattgccgggctcatagccatcgtgatggtgacgatcatgctgtgttgcatgacctcttgctgttcttgtctgaaggggtgctgctcttgtgggagttgttgtaaattcgatgaggatgattccgaacctgtgctgaagggagtcgcgctcgcctatacgtaagcgcgcagcgcttagacgtctcgcgatcgatactagtacaacctaaatccattataaaaaacttaggagcaaagtgattgcctcccaaggtccacaatgacagagacctacgacttcgacaagtcggcatgggacatcaaagggtcgatcgctccgatacaacccaccacctacagtgatggcaggctggtgccccaggtcagagtcatagatcctggtctaggcgacaggaaggatgaatgctttatgtacatgtttctgctgggggttgttgaggacagcgattccctagggcctccaatcgggcgagcatttgggttcctgcccttaggtgttggcagatccacagcaaagcccgaaaaactcctcaaagaggccactgagcttgacatagttgttagacgtacagcagggctcaatgaaaaactggtgttctacaacaacaccccactaactctcctcacaccttggagaaaggtcctaacaacagggagtgtcttcaacgcaaaccaagtgtgcaatgcggttaatctgataccgctcgataccccgcagaggttccgtgttgtttatatgagcatcacccgtctttcggataacgggtattacaccgttcctagaagaatgctggaattcagatcggtcaatgcagtggccttcaacctgctggtgacccttaggattgacaaggcgataggccctgggaagatcatcgacaatacagagcaacttcctgaggcaacatttatggtccacatcgggaacttcaggagaaagaagagtgaagtctactctgccgattattgcaaaatgaaaatcgaaaagatgggcctggtttttgcacttggtgggatagggggcaccagtcttcacattagaagcacaggcaaaatgagcaagactctccatgcacaactcgggttcaagaagaccttatgttacccgctgatggatatcaatgaagaccttaatcgattactctggaggagcagatgcaagatagtaagaatccaggcagttttgcagccatcagttcctcaagaattccgcatttacgacgacgtgatcataaatgatgaccaaggactattcaaagttctgtagaccgtagtgcccagcaatgcccgaaaacgacccccctcacaatgacagccagaaggcccggacaaaaaagccccctccgaaagactccacggaccaagcgagaggccagccagcagccgacggcaagcgcgaacaccaggcggccccagcacagaacagccctgacacaaggccaccaccagccaccccaatctgcatcctcctcgtgggacccccgaggaccaacccccaaggctgcccccgatccaaaccaccaaccgcatccccaccacccccgggaaagaaacccccagcaattggaaggcccctccccctcttcctcaacacaagaactccacaaccgaaccgcacaagcgaccgaggtgacccaaccgcaggcatccgactccctagacagatcctctctccccggcaaactaaacaaaacttagggccaaggaacatacacacccaacagaacccagaccccggcccacggcgccgcgcccccaacccccgacaaccagagggagcccccaaccaatcccgccggctcccccggtgcccacaggcagggacaccaacccccgaacagacccagcacccaaccatcgacaatccaagacgggggggcccccccaaaaaaaggcccccaggggccgacagccagcaccgcgaggaagcccacccaccccacacacgaccacggcaaccaaaccagaacccagaccaccctgggccaccagctcccagactcggccatcaccccgcagaaaggaaaggccacaacccgcgcaccccagccccgatccggcggggagccacccaacccgaaccagcacccaagagcgatccccgaaggacccccgaaccgcaaaggacatcagtatcccacagcctctccaagtcccccggtctcctcctcttctcgaagggaccaaaagatcaatccaccacacccgacgacactcaactccccacccctaaaggagacaccgggaatcccagaatcaagactcatccaatgtccatcatgggtctcaaggtgaacgtctctgccatattcatggcagtactgttaactctccaaacacccaccggtcaaatccattggggcaatctctctaagataggggtggtaggaataggaagtgcaagctacaaagttatgactcgttccagccatcaatcattagtcataaaattaatgcccaatataactctcctcaataactgcacgagggtagagattgcagaatacaggagactactgagaacagttttggaaccaattagagatgcacttaatgcaatgacccagaatataagaccggttcagagtgtagcttcaagtaggagacacaagagatttgcgggagtagtcctggcaggtgcggccctaggcgttgccacagctgctcagataacagccggcattgcacttcaccagtccatgctgaactctcaagccatcgacaatctgagagcgagcctggaaactactaatcaggcaattgagacaatcagacaagcagggcaggagatgatattggctgttcagggtgtccaagactacatcaataatgagctgataccgtctatgaaccaactatcttgtgatttaatcggccagaagctcgggctcaaattgctcagatactatacagaaatcctgtcattatttggccccagtttacgggaccccatatctgcggagatatctatccaggctttgagctatgcgcttggaggagacatcaataaggtgttagaaaagctcggatacagtggaggtgatttactgggcatcttagagagcggaggaataaaggcccggataactcacgtcgacacagagtcctacttcattgtcctcagtatagcctatccgacgctgtccgagattaagggggtgattgtccaccggctagagggggtctcgtacaacataggctctcaagagtggtataccactgtgcccaagtatgttgcaacccaagggtaccttatctcgaattttgatgagtcatcgtgtactttcatgccagaggggactgtgtgcagccaaaatgccttgtacccgatgagtcctctgctccaagaatgcctccgggggtacaccaagtcctgtgctcgtacactcgtatccgggtcttttgggaaccggttcattttatcacaagggaacctaatagccaattgtgcatcaatcctttgcaagtgttacacaacaggaacgatcattaatcaagaccctgacaagatcctaacatacattgctgccgatcactgcccggtagtcgaggtgaacggcgtgaccatccaagtcgggagcaggaggtatccagacgctgtgtacttgcacagaattgacctcggtcctcccatatcattggagaggttggacgtagggacaaatctggggaatgcaattgctaagttggaggatgccaaggaattgttggagtcatcggaccagatattgaggagtatgaaaggtttatcgagcactagcatagtctacatcctgattgcagtgtgtcttggagggttgatagggatccccgctttaatatgttgctgcagggggcgttgtaacaaaaagggagaacaagttggtatgtcaagaccaggcctaaagcctgatcttacgggaacatcaaaatcctatgtaaggtcgctctgatcctctacaactcttgaaacacaaatgtcccacaagtctcctcttcgtcatcaagcaaccaccgcacccagcatcaagcccacctgaaattatctccggcttccctctggccgaacaatatcggtagttaatcaaaacttagggtgcaagatcatccacaatgtcaccacaacgagaccggataaatgccttctacaaagataacccccatcccaagggaagtaggatagtcattaacagagaacatcttatgattgatagaccttatgttttgctggctgttctgtttgtcatgtttctgagcttgatcgggttgctagccattgcaggcattagacttcatcgggcagccatctacaccgcagagatccataaaagcctcagcaccaatctagatgtaactaactcaatcgagcatcaggtcaaggacgtgctgacaccactcttcaaaatcatcggtgatgaagtgggcctgaggacacctcagagattcactgacctagtgaaattaatctctgacaagattaaattccttaatccggatagggagtacgacttcagagatctcacttggtgtatcaacccgccagagagaatcaaattggattatgatcaatactgtgcagatgtggctgctgaagagctcatgaatgcattggtgaactcaactctactggagaccagaacaaccaatcagttcctagctgtctcaaagggaaactgctcagggcccactacaatcagaggtcaattctcaaacatgtcgctgtccctgttagacttgtatttaggtcgaggttacaatgtgtcatctatagtcactatgacatcccagggaatgtatgggggaacttacctagtggaaaagcctaatctgagcagcaaaaggtcagagttgtcacaactgagcatgtaccgagtgtttgaagtaggtgttatcagaaatccgggtttgggggctccggtgttccatatgacaaactatcttgagcaaccagtcagtaatgatctcagcaactgtatggtggctttgggggagctcaaactcgcagccctttgtcacggggaagattctatcacaattccctatcagggatcagggaaaggtgtcagcttccagctcgtcaagctaggtgtctggaaatccccaaccgacatgcaatcctgggtccccttatcaacggatgatccagtgatagacaggctttacctctcatctcacagaggtgttatcgctgacaatcaagcaaaatgggctgtcccgacaacacgaacagatgacaagttgcgaatggagacatgcttccaacaggcgtgtaagggtaaaatccaagcactctgcgagaatcccgagtgggcaccattgaaggataacaggattccttcatacggggtcttgtctgttgatctgagtctgacagttgagcttaaaatcaaaattgcttcgggattcgggccattgatcacacacggttcagggatggacctatacaaatccaaccacaacaatgtgtattggctgactatcccgccaatgaagaacctagccttaggtgtaatcaacacattggagtggataccgagattcaaggttagtccctacctcttcactgtcccaattaaggaagcaggcgaagactgccatgccccaacatacctacctgcggaggtggatggtgatgtcaaactcagttccaatctggtgattctacctggtcaagatctccaatatgttttggcaacctacgatacttccagggttgaacatgctgtggtttattacgtttacagcccaagccgctcattttcttacttttatccttttaggttgcctataaagggggtccccatcgaattacaagtggaatgcttcacatgggaccaaaaactctggtgccgtcacttctgtgtgcttgcggactcagaatctggtggacatatcactcactctgggatggtgggcatgggagtcagctgcacagtcacccgggaagatggaaccaatcgcagatagggctgctagtgaaccaatcacatgatgtcacccagacatcaggcatacccactagtgtgaaatagacatcagaattaagaaaaacgtagggtccaagtggttccccgttatggactcgctatctgtcaaccagatcttataccctgaagttcacctagatagcccgatagttaccaataagatagtagccatcctggagtatgctcgagtccctcacgcttacagcctggaggaccctacactgtgtcagaacatcaagcaccgcctaaaaaacggattttccaaccaaatgattataaacaatgtggaagttgggaatgtcatcaagtccaagcttaggagttatccggcccactctcatattccatatccaaattgtaatcaggatttatttaacatagaagacaaagagtcaacgaggaagatccgtgaactcctcaaaaaggggaattcgctgtactccaaagtcagtgataaggttttccaatgcttaagggacactaactcacggcttggcctaggctccgaattgagggaggacatcaaggagaaagttattaacttgggagtttacatgcacagctcccagtggtttgagccctttctgttttggtttacagtcaagactgagatgaggtcagtgattaaatcacaaacccatacttgccataggaggagacacacacctgtattcttcactggtagttcagttgagttgctaatctctcgtgaccttgttgctataatcagtaaagagtctcaacatgtatattacctgacatttgaactggttttgatgtattgtgatgtcatagaggggaggttaatgacagagaccgctatgactattgatgctaggtatacagagcttctaggaagagtcagatacatgtggaaactgatagatggtttcttccctgcactcgggaatccaacttatcaaattgtagccatgctggagcctctttcacttgcttacctgcagctgagggatataacagtagaactcagaggtgctttccttaaccactgctttactgaaatacatgatgttcttgaccaaaacgggttttctgatgaaggtacttatcatgagttaactgaagctctagattacattttcataactgatgacatacatctgacaggggagattttctcatttttcagaagtttcggccaccccagacttgaagcagtaacggctgctgaaaatgttaggaaatacatgaatcagcctaaagtcattgtgtatgagactctgatgaaaggtcatgccatattttgtggaatcataatcaacggctatcgtgacaggcacggaggcagttggccaccgctgaccctccccctgcatgctgcagacacaatccggaatgctcaagcttcaggtgaagggttaacacatgagcagtgcgttgataactggaaatcttttgctggagtgaaatttggctgctttatgcctcttagcctggatagtgatctgacaatgtacctaaaggacaaggcacttgctgctctccaaagggaatgggattcagtttacccgaaagagttcctgcgttacgaccctcccaagggaaccgggtcacggaggcttgtagatgttttccttaatgattcgagctttgacccatatgatgtgataatgtatgttgtaagtggagcttacctccatgaccctgagttcaacctgtcttacagcctgaaagaaaaggagatcaaggaaacaggtagactttttgctaaaatgacttacaaaatgagggcatgccaagtgattgctgaaaatctaatctcaaacgggattggcaaatattttaaggacaatgggatggccaaggatgagcacgatttgactaaggcactccacactctagctgtctcaggagtccccaaagatctcaaagaaagtcacaggggggggccagtcttaaaaacctactcccgaagcccagtccacacaagtaccaggaacgtgagagcagcaaaagggtttatagggttccctcaagtaattcggcaggaccaagacactgatcatccggagaatatggaagcttacgagacagtcagtgcatttatcacgactgatctcaagaagtactgccttaattggagatatgagaccatcagcttgtttgcacagaggctaaatgagatttacggattgccctcatttttccagtggctgcataagaggcttgagacctctgtcctgtatgtaagtgaccctcattgcccccccgaccttgacgcccatatcccgttatataaagtccccaatgatcaaatcttcattaagtaccctatgggaggtatagaagggtattgtcagaagctgtggaccatcagcaccattccctatctatacctggctgcttatgagagcggagtaaggattgcttcgttagtgcaaggggacaatcagaccatagccgtaacaaaaagggtacccagcacatggccctacaaccttaagaaacgggaagctgctagagtaactagagattactttgtaattcttaggcaaaggctacatgatattggccatcacctcaaggcaaatgagacaattgtttcatcacatttttttgtctattcaaaaggaatatattatgatgggctacttgtgtcccaatcactcaagagcatcgcaagatgtgtattctggtcagagactatagttgatgaaacaagggcagcatgcagtaatattgctacaacaatggctaaaagcatcgagagaggttatgaccgttaccttgcatattccctgaacgtcctaaaagtgatacagcaaattctgatctctcttggcttcacaatcaattcaaccatgacccgggatgtagtcatacccctcctcacaaacaacgacctcttaataaggatggcactgttgcccgctcctattggggggatgaattatctgaatatgagcaggctgtttgtcagaaacatcggtgatccagtaacatcatcaattgctgatctcaagagaatgattctcgcctcactaatgcctgaagagaccctccatcaagtaatgacacaacaaccgggggactcttcattcctagactgggctagcgacccttactcagcaaatcttgtatgtgtccagagcatcactagactcctcaagaacataactgcaaggtttgtcctgatccatagtccaaacccaatgttaaaaggattattccatgatgacagtaaagaagaggacgagggactggcggcattcctcatggacaggcatattatagtacctagggcagctcatgaaatcctggatcatagtgtcacaggggcaagagagtctattgcaggcatgctggataccacaaaaggcttgattcgagccagcatgaggaagggggggttaacctctcgagtgataaccagattgtccaattatgactatgaacaattcagagcagggatggtgctattgacaggaagaaagagaaatgtcctcattgacaaagagtcatgttcagtgcagctggcgagagctctaagaagccatatgtgggcgaggctagctcgaggacggcctatttacggccttgaggtccctgatgtactagaatctatgcgaggccaccttattcggcgtcatgagacatgtgtcatctgcgagtgtggatcagtcaactacggatggttttttgtcccctcgggttgccaactggatgatattgacaaggaaacatcatccttgagagtcccatatattggttctaccactgatgagagaacagacatgaagcttgccttcgtaagagccccaagtcgatccttgcgatctgctgttagaatagcaacagtgtactcatgggcttacggtgatgatgatagctcttggaacgaagcctggttgttggctaggcaaagggccaatgtgagcctggaggagctaagggtgatcactcccatctcaacttcgactaatttagcgcataggttgagggatcgtagcactcaagtgaaatactcaggtacatcccttgtccgagtggcgaggtataccacaatctccaacgacaatctctcatttgtcatatcagataagaaggttgatactaactttatataccaacaaggaatgcttctagggttgggtgttttagaaacattgtttcgactcgagaaagataccggatcatctaacacggtattacatcttcacgtcgaaacagattgttgcgtgatcccgatgatagatcatcccaggatacccagctcccgcaagctagagctgagggcagagctatgtaccaacccattgatatatgataatgcacctttaattgacagagatgcaacaaggctatacacccagagccataggaggcaccttgtggaatttgttacatggtccacaccccaactatatcacattttagctaagtccacagcactatctatgattgacctggtaacaaaatttgagaaggaccatatgaatgaaatttcagctctcataggggatgacgatatcaatagtttcataactgagtttctgctcatagagccaagattattcactatctacttgggccagtgtgcggccatcaattgggcatttgatgtacattatcatagaccatcagggaaatatcagatgggtgagctgttgtcatcgttcctttctagaatgagcaaaggagtgtttaaggtgcttgtcaatgctctaagccacccaaagatctacaagaaattctggcattgtggtattatagagcctatccatggtccttcacttgatgctcaaaacttgcacacaactgtgtgcaacatggtttacacatgctatatgacctacctcgacctgttgttgaatgaagagttagaagagttcacatttctcttgtgtgaaagcgacgaggatgtagtaccggacagattcgacaacatccaggcaaaacacttatgtgttctggcagatttgtactgtcaaccagggacctgcccaccaattcgaggtctaagaccggtagagaaatgtgcagttctaaccgaccatatcaaggcagaggctatgttatctccagcaggatcttcgtggaacataaatccaattattgtagaccattactcatgctctctgacttatctccggcgaggatcgatcaaacagataagattgagagttgatccaggattcattttcgacgccctcgctgaggtaaatgtcagtcagccaaagatcggcagcaacaacatctcaaatatgagcatcaaggctttcagacccccacacgatgatgttgcaaaattgctcaaagatatcaacacaagcaagcacaatcttcccatttcagggggcaatctcgccaattatgaaatccatgctttccgcagaatcgggttgaactcatctgcttgctacaaagctgttgagatatcaacattaattaggagatgccttgagccaggggaggacggcttgttcttgggtgagggatcgggttctatgttgatcacttataaagagatacttaaactaaacaagtgcttctataatagtggggtttccgccaattctagatctggtcaaagggaattagcaccctatccctccgaagttggccttgtcgaacacagaatgggagtaggtaatattgtcaaagtgctctttaacgggaggcccgaagtcacgtgggtaggcagtgtagattgcttcaatttcatagttagtaatatccctacctctagtgtggggtttatccattcagatatagagaccttgcctgacaaagatactatagagaagctagaggaattggcagccatcttatcgatggctctgctcctgggcaaaataggatcaatactggtgattaagcttatgcctttcagcggggattttgttcagggatttataagttatgtagggtctcattatagagaagtgaaccttgtataccctagatacagcaacttcatctctactgaatcttatttggttatgacagatctcaaggctaaccggctaatgaatcctgaaaagattaagcagcagataattgaatcatctgtgaggacttcacctggacttataggtcacatcctatccattaagcaactaagctgcatacaagcaattgtgggagacgcagttagtagaggtgatatcaatcctactctgaaaaaacttacacctatagagcaggtgctgatcaattgcgggttggcaattaacggacctaagctgtgcaaagaattgatccaccatgatgttgcctcagggcaagatggattgcttaattctatactcatcctctacagggagttggcaagattcaaagacaaccaaagaagtcaacaagggatgttccacgcttaccccgtattggtaagtagcaggcaacgagaacttatatctaggatcacccgcaaattctgggggcacattcttctttactccgggaacaaaaagttgataaataagtttatccagaatctcaagtccggctatctgatactagacttacaccagaatatcttcgttaagaatctatccaagtcagagaaacagattattatgacggggggtttgaaacgtgagtgggtttttaaggtaacagtcaaggagaccaaagaatggtataagttagtcggatacagtgccctgattaaggactaattggttgaactccggaaccctaatcctgccctaggtggttaggcattatttgcaatatattaaagaaaactttgaaaatacgaagtttctattcccagctttgtctggtggccggcatggtcccagcctcctcgctggcgccggctgggcaacattccgaggggaccgtcccctcggtaatggcgaatgggacgcggccgatccggctgctaacaaagcccgaaaggaagctgagttggctgctgccaccgctgagcaataactagcataaccccttggggcctctaaacgggtcttgaggggttttttgctgaaaggaggaactatatccggatgcggccgcgggccctatggtacccagcttttgttccctttagtgagggttaattccgagcttggcgtaatcatggtcatagctgtttcctgtgtgaaattgttatccgctcacaattccacacaacataggagccggaagcataaagtgtaaagcctggggtgcctaatgagtgaggtaactcacattaattgcgttgcgctcactgcccgctttccagtcgggaaacctgtcgtgccagctgcattaatgaatcggccaacgcgcggggagaggcggtttgcgtattgggcgctcttccgcttcctcgctcactgactcgctgcgctcggtcgttcggctgcggcgagcggtatcagctcactcaaaggcggtaatacggttatccacagaatcaggggataacgcaggaaagaacatgtgagcaaaaggccagcaaaaggccaggaaccgtaaaaaggccgcgttgctggcgtttttccataggctcggcccccctgacgagcatcacaaaaatcgacgctcaagtcagaggtggcgaaacccgacaggactataaagataccaggcgttcccccctggaagctccctcgtgcgctctcctgttccgaccctgccgcttaccggatacctgtccgcctttctcccttcgggaagcgtggcgctttctcaatgctcacgctgtaggtatctcagttcggtgtaggtcgttcgctccaagctgggctgtgtgcacgaaccccccgttcagcccgaccgctgcgccttatccggtaactatcgtcttgagtccaacccggtaagacacgacttatcgccactggcagcagccactggtaacaggattagcagagcgaggtatgtaggcggtgctacagagttcttgaagtggtggcctaactacggctacactagaaggacagtatttggtatctgcgctctgctgaagccagttaccttcggaaaaagagttggtagctcttgatccggcaaacaaaccaccgctggtagcggtggtttttttgtttgcaagcagcagattacgcgcagaaaaaaaggatctcaagaagatcctttgatcttttctacggggtctgacgctcagtggaacgaaaactcacgttaagggattttggtcatgagattatcaaaaaggatcttcacctagatccttttaaattaaaaatgaagttttaaatcaatctaaagtatatatgagtaaacttggtctgacagttaccaatgcttaatcagtgaggcacctatctcagcgatctgtctatttcgttcatccatagttgcctgactgcccgtcgtgtagataactacgatacgggagggcttaccatctggccccagtgctgcaatgataccgcgagacccacgctcaccggctccagatttatcagcaataaaccagccagccggaagggccgagcgcagaagtggtcctgcaactttatccgcctccatccagtctattaattgttgccgggaagctagagtaagtagttcgccagttaatagtttgcgcaacgttgttgccattgctacaggcatcgtggtgtcacgctcgtcgtttggtatggcttcattcagctccggttcccaacgatcaaggcgagttacatgatcccccatgttgtgaaaaaaagcggttagctccttcggtcctccgatcgttgtcagaagtaagttggccgcagtgttatcactcatgcttatggcagcactgcataattctcttactgtcatgccatccgtaagatgcttttctgtgactggtgagtactcaaccaagtcattctgagaatagtgtatgcggcgaccgagttgctcttgcccggcgtcaatacgggataataccgcgccacatagcagaactttaaaagtgctcatcattggaaaacgttcttcggggcgaaaactctcaaggatcttaccgctgttgagatccagttcgatgtaacccactcgtgcacccaactgatcttcagcatcttttactttcaccagcgtttctgggtgagcaaaaacaggaaggcaaaatgccgcaaaaaagggaataagggcgacacggaaatgttgaatactcatactcttcctttttcaatattattgaagcatttatcagggttattgtctcatgagcggatacatatttgaatgtatttagaaaaataaacaaataggggttccgcgcacatttccccgaaaagtgccacctgaaattgtaaacgttaatattttgttaaaattcgcgttaaatttttgttaaatcagctcattttttaaccaataggccgaaatcggcaaaatcccttataaatcaaaagaatagaccgagatagggttgagtgttgttccagtttggaacaagagtccactattaaagaacgtggactccaacgtcaaagggcgaaaaaccgtctatcagggcgatggcccactacgtgaaccatcaccctaatcaagttttttggggtcgaggtgccgtaaagcactaaatcggaaccctaaagggagcccccgatttagagcttgacggggaaagccggcgaacgtggcgagaaaggaagggaagaaagcgaaaggagcgggcgctagggcgctggcaagtgtagcggtcacgctgcgcgtaaccaccacacccgccgcgcttaatgcgccgctacagggcgcgtcccatt

SEQ ID NO: 149 - protein, 5 aa, Artificial sequence
  Endoplasmic reticulum retrieval signal (ERRS) motif
  misc_feature (2)..(2): Xaa can be any naturally occuring amino acid
  misc_feature (4)..(4): Xaa can be any naturally occuring amino acid
  misc_feature (5)..(5): Xaa can be any naturally occuring amino acid
KXHXX

SEQ ID NO: 150 - protein, 5 aa, Artificial sequence
  KLHYT motif
KLHYT

1. A nucleic acid construct comprising:
(1) a cDNA molecule encoding a full length, antigenomic (+) RNA strand of an attenuated strain of measles virus (MV); and
(2) a first heterologous polynucleotide encoding:
(a) a spike (S) protein of SARS-CoV-2 of SEQ ID NO: 3, or
(b) an immunogenic fragment of the full-length S protein in (a) selected from the group consisting of the S1 polypeptide of SEQ ID NO: 11, the S2 polypeptide of SEQ ID NO: 13, the Secto polypeptide of SEQ ID NO: 7 and the tri-Secto polypeptide of SEQ ID NO: 16, or
(c) a variant of (a) or (b) in which from 1 to 10 amino acids are modified by insertion, substitution, or deletion.

2. The nucleic acid construct according to claim 1, wherein the variant in (c) encodes a polypeptide comprising:
(i) a mutation that maintains the expressed full length S protein in its prefusion conformation, and/or
(ii) a mutation that inactivates the furin cleavage site of the S protein, and/or
(iii) a mutation that inactivates the Endoplasmic Reticulum Retrieval Signal (EERS), and/or
(iv) a mutation that maintains the receptor-binding domain (RBD) localized in the S1 domain of the S protein in the closed conformation, and
wherein the first heterologous polynucleotide is positioned in an additional transcription unit (ATU) located between the P gene and the M gene of the MV (ATU2) or in an ATU located downstream of the H gene of the MV (ATU3).

3. The nucleic acid construct according to claim 2, wherein:
(i) the mutation that maintains the expressed full length S protein in its prefusion conformation is a mutation by substitution of two proline residues at positions 986 and 987 (K986P and V987P) of the amino acid sequence of the S protein of SARS-CoV-2 of SEQ ID NO: 3, or a mutation by substitution of six proline residues at positions 817, 892, 899, 942, 986 and 987 (F817P, A892P, A899P, A942P, K986P and V987P) of the amino acid sequence of the S protein of SARS-CoV-2 of SEQ ID NO: 3, and/or
(ii) the mutation that inactivates the furin cleavage site of the S protein is a mutation by substitution of three amino acid residues occurring in the S1/S2 furin cleavage site at positions 682, 683 and 685 (R682G, R683S and R685G) of the amino acid sequence of the S protein of SARS-CoV-2 of SEQ ID NO: 3, or a mutation by deletion of the loop encompassing the S1/S2 furin cleavage site between amino acid at position 675 and amino acid at position 685 of the S protein of SARS-CoV-2 of SEQ ID NO: 3, the loop consisting of the amino acid sequence QTQTNSPRRAR of SEQ ID NO: 50, and/or
(iii) the mutation that inactivates the EERS is a mutation by substitution of two alanine residues at positions 1269 and 1271 of the amino acid sequence of SEQ ID NO: 3, and/or
(iv) the mutation that maintains the RBD localized in the S1 domain of the S protein in the closed conformation is a mutation by substitution of two cysteine residues at positions 383 and 985 (S383C and D985C) of the amino acid sequence of the S protein of SARS-CoV-2 of SEQ ID NO: 3, or a mutation by substitution of two cysteine residues at positions 413 and 987 (G413C and P987C) of the amino acid sequence of the S protein of SARS-CoV-2 of SEQ ID NO: 3; and/or
(v) the variant in (c) encodes a polypeptide comprising a mutation selected from the group consisting of a deletion of the amino acid residues at positions 69 and 70 of the amino acid sequence of SEQ ID NO: 3, a deletion of the amino acid residues at positions 144 and 145 of the amino acid sequence of SEQ ID NO: 3, a mutation by substitution of the tyrosine residue at position 501 of the amino acid sequence of SEQ ID NO: 3 (N501Y), a mutation by substitution of the aspartic acid residue at position 570 of the amino acid sequence of SEQ ID NO: 3 (A570D), a mutation by substitution of the histidine residue at position 681 of the amino acid sequence of SEQ ID NO: 3 (P681H), a mutation by substitution of the isoleucine residue at position 716 of the amino acid sequence of SEQ ID NO: 3 (T7161), a mutation by substitution of the alanine residue at position 982 of the amino acid sequence of SEQ ID NO: 3 (S982A), a mutation by substitution of the histidine residue at position 1118 of the amino acid sequence of SEQ ID NO: 3 (D1118H), a mutation by substitution of the lysine residue at position 484 of the amino acid sequence of SEQ ID NO: 3 (E484K), a mutation by substitution of the asparagine residue at position 417 of the amino acid sequence of SEQ ID NO: 3 (K417N), a mutation by substitution of the threonine residue at position 417 of the amino acid sequence of SEQ ID NO: 3 (K417T) and a mutation by substitution of the glycine residue at position 614 of the amino acid sequence of SEQ ID NO: 3 (D614G).

4. The nucleic acid construct according to any one of claims 1 to 3, further comprising a second heterologous polynucleotide encoding at least one polypeptide of SARS-CoV-2 selected from the group consisting of: nucleocapsid (N) polypeptide or a variant thereof having at least 90% identity with the N polypeptide, matrix (M) polypeptide or a variant thereof having at least 90% identity with M polypeptide, E polypeptide or a variant thereof having at least 90% identity with E polypeptide, 8a polypeptide or a variant thereof having at least 90% identity with 8a polypeptide, 7a polypeptide or a variant thereof having at least 90% identity with 7a polypeptide, 3A polypeptide or a variant thereof having at least 90% identity with 3a polypeptide, and immunogenic fragments thereof; the second heterologous polynucleotide positioned within an additional transcription unit (ATU) at a location different from the ATU of the first heterologous polynucleotide.

5. The nucleic acid construct according to any one of claims 1 to 4, wherein the first heterologous polynucleotide encodes a polypeptide having an amino acid sequence selected from the group consisting of SEQ ID NOs: 5, 7, 9, 15, 17, 19, 43, 45, 47, 49, 52, 54, 56, 58, 60, 62 and 65.

6. The nucleic acid construct according to claim 4, wherein the second heterologous polynucleotide encodes at least one of the N polypeptide of SEQ ID NO: 22, the M polypeptide of sequence SEQ ID NO: 24 or its endodomain, the E polypeptide of sequence SEQ ID NO: 23, the ORF8 polypeptide of SEQ ID NO: 25, the ORF7a polypeptide of SEQ ID NO: 27, and the ORF3a polypeptide of SEQ ID NO: 26.

7. The nucleic acid construct according to any one of claims 1 to 6, wherein the first heterologous polynucleotide has the open reading frame selected from the group consisting of:
i. SEQ ID NO: 1 or 2 or 36 which encodes the S polypeptide,
ii. SEQ ID NO: 10 which encodes the S1 polypeptide,
iii. SEQ ID NO: 12 which encodes the S2 polypeptide,
iv. SEQ ID NO: 4 which encodes the stab-S polypeptide (S2P),
v. SEQ ID NO: 6 which encodes the Secto polypeptide,
vi. SEQ ID NO: 8 which encodes the stab-Secto polypeptide,
vii. SEQ ID NO:14 which encodes the stab-S2 polypeptide,
viii. SEQ ID NO: 16 which encodes the tri-Secto polypeptide,
ix. SEQ ID NO: 18 which encodes the tristab-Secto polypeptide,
x. SEQ ID NO: 42 which encodes the S3F polypeptide,
xi. SEQ ID NO: 44 which encodes the S2P3F polypeptide,
xii. SEQ ID NO: 46 which encodes the S2PΔF polypeptide,
xiii. SEQ ID NO: 48 which encodes the S2PΔF2A polypeptide,
xiv. SEQ ID NO: 51 which encodes the T4-S2P3F polypeptide (tristab-Secto-3F),
xv. SEQ ID NO: 53 which encodes the S6P polypeptide,
xvi. SEQ ID NO: 55 which encodes the S6P3F polypeptide,
xvii. SEQ ID NO: 57 which encodes the S6PΔF polypeptide,
xviii. SEQ ID NO: 59 which encodes the SCCPP polypeptide,
xix. SEQ ID NO: 61 which encodes the SCC6P polypeptide,
xx. SEQ ID NO: 63 which encodes the S_{MVopt}2P polypeptide,
xxi. SEQ ID NO: 64 which encodes the S_{MVopt}ΔF polypeptide, and
xxii. SEQ ID NO: 66 which encodes the S_{MVopt}2PΔF polypeptide.

8. The nucleic acid construct according to any one of claims 1 to 7, which is a cDNA construct comprising from 5′ to 3′ end the following polynucleotides coding for open reading frames:
(a) a polynucleotide encoding the N protein of the MV;
(b) a polynucleotide encoding the P protein of the MV;
(c) the first heterologous polynucleotide as defined in any one of claims 1-3, 4 and 6;
(d) a polynucleotide encoding the M protein of the MV;
(e) a polynucleotide encoding the F protein of the MV;
(f) a polynucleotide encoding the H protein of the MV;
(g) a polynucleotide encoding the L protein of the MV; and
wherein the polynucleotides are operatively linked within the nucleic acid construct and are under the control of a viral replication and transcriptional regulatory elements such as MV leader and trailer sequences and are framed by a T7 promoter and a T7 terminator and are framed by restriction sites suitable for cloning in a vector to provide a recombinant MV-CoV expression cassette.

9. The nucleic acid construct according to any one of claims 1 to 8, further comprising:
(a) a GGG motif followed by a hammerhead ribozyme sequence at the 5′-end of the nucleic acid construct, adjacent to a first nucleotide of the nucleotide sequence encoding a full-length antigenomic (+)RNA strand of an attenuated MV strain, in particular of a Schwarz strain or of a Moraten strain, and
(b) a nucleotide sequence of a ribozyme, in particular the sequence of the Hepatitis delta virus ribozyme (6), at the 3′-end of the recombinant MV-CoV nucleic acid molecule, adjacent to the last nucleotide of the nucleotide sequence encoding the full length anti-genomic (+)RNA strand.

10. The nucleic acid construct according to any one of claims 4 to 9, wherein the second heterologous polynucleotide encodes the N polypeptide of SARS-CoV-2, and the second heterologous polynucleotide being cloned in an ATU at a different location with respect to the ATU used for cloning the first heterologous polynucleotide.

11. The nucleic acid construct according to any one of claims 1 to 10, wherein:
(i) the first heterologous polynucleotide comprises a sequence selected from the group consisting of SEQ ID NO: 36, SEQ ID NO: 63, SEQ ID NO: 64 and SEQ ID NO: 66, and is positioned within ATU2, or
(ii) the first heterologous polynucleotide comprises a sequence selected from the group consisting of SEQ ID NO: 2, SEQ ID NO: 4, SEQ ID NO: 44, SEQ ID NO: 46, SEQ ID NO: 48, SEQ ID NO: 51, SEQ ID NO: 53, SEQ ID NO: 55, SEQ ID NO: 57, SEQ ID NO: 59 and SEQ ID NO: 61, and is positioned within ATU3.

12. The nucleic acid construct according to any one of claims 4 to 10, wherein:
(i) the first heterologous polynucleotide is positioned within ATU3 and the second heterologous polynucleotide is positioned within ATU2, or
(ii) the first heterologous polynucleotide is positioned within ATU2 and the second heterologous polynucleotide is positioned within ATU3.

13. The nucleic acid construct according to any one of claims 1 to 12, wherein the measles virus is an attenuated virus strain selected from the group consisting of the Schwarz strain, the Zagreb strain, the AIK-C strain, the Moraten strain, the Philips strain, the Beckenham 4A strain, the Beckenham 16 strain, the CAM-70 strain, the TD 97 strain, the Leningrad-16 strain, the Shanghai 191 strain and the Belgrade strain.

14. A transfer vector for the rescue of a recombinant Measles virus (MV), comprising the nucleic acid construct according to any one of claims 1 to 13.

15. A transfer vector comprising a sequence encoding a polypeptide of SARS-CoV-2 that is selected from the group consisting of:
i. SEQ ID NO: 1 or 2 or 36 (construct S),
ii. SEQ ID NO: 4 (construct stab-S),
iii. SEQ ID NO: 6 (construct Secto),
iv. SED ID NO: 8 (construct stab-Secto),
v. SEQ ID NO: 10 (construct S1),
vi. SEQ ID NO: 12 (construct S2),
vii. SEQ ID NO: 14 (construct stab-S2),
viii. SEQ ID NO: 16 (construct tri-Secto),
ix. SEQ ID NO: 18 (construct tristab-Secto),
x. SEQ ID NO: 42 (construct S3F),
xi. SEQ ID NO: 44 (construct S2P3F),
xii. SEQ ID NO: 46 (construct S2PΔF),
xiii. SEQ ID NO: 48 (construct S2PΔF2A),
xiv. SEQ ID NO: 21 or 37 (construct N),
xv. SEQ ID NO: 51 (construct T4-S2P3F (tristab-Secto-3F)),
xvi. SEQ ID NO: 53 (construct S6P),
xvii. SEQ ID NO: 55 (construct S6P3F),
xviii. SEQ ID NO: 57 (construct S6PΔF),
xix. SEQ ID NO: 59 (construct SCCPP),
xx. SEQ ID NO: 61 (construct SCC6P),
xxi. SEQ ID NO: 63 (construct S_{MVopt}2P),
xxii. SEQ ID NO: 64 (construct S_{MVopt}ΔF), and
xxiii. SEQ ID NO: 66 (construct S_{MVopt}2PΔF).

16. A recombinant measles virus of the Schwarz strain comprising in its genome an expression cassette operatively linked thereto, the expression cassette comprising the nucleic acid construct according to any one of claims 1 to 13.

17. The recombinant measles virus according to claim 16, further expressing at least one polypeptide selected from N, M, E, ORF7a, ORF8 and ORF3a of the SARS-CoV-2 strain, and immunogenic fragments thereof.

18. An immunogenic composition or a vaccine comprising (i) an effective dose of the recombinant measles virus according to claim 16 or 17, and (ii) a pharmaceutically acceptable vehicle, wherein the composition or the vaccine elicits a neutralizing humoral response and/or a cellular response against the polypeptide(s) of SARS-CoV-2 in an animal host after a single immunization.

19. The immunogenic composition or vaccine according to claim 18 for use in eliciting a protective humoral immune response and/or a cellular immune response against SARS-CoV-2 in a host in need thereof.

20. A process for rescuing recombinant measles virus expressing the polypeptide of SARS-CoV-2 encoded by the first heterologous polynucleotide as defined in any one of claims 1-3, 4 and 6 of SARS-CoV-2, comprising:
(a) co-transfecting helper cells stably expressing T7 RNA polymerase and measles virus N and P proteins with (i) the nucleic acid construct according to any one of claims 1 to 13 or with the plasmid vector according to claim 13 or 14, and with (ii) a vector encoding the MV L polymerase;
(b) maintaining the transfected cells in conditions suitable for the production of recombinant measles virus;
(c) infecting cells enabling propagation of the recombinant measles virus by co-cultivating them with the transfected cells of step (b); and
(d) harvesting the recombinant measles virus.

21. A nucleic acid molecule comprising a polynucleotide selected from the group consisting of:
i. SEQ ID NO: 1 or 2 or 36 (construct S);
ii. SEQ ID NO: 4 (construct stab-S);
iii. SEQ ID NO: 6 (construct Secto);
iv. SED ID NO: 8 (construct stab-Secto);
v. SEQ ID NO: 10 (construct S1),
vi. SEQ ID NO: 12 (construct S2),
vii. SEQ ID NO: 14 (construct stab-S2),
viii. SEQ ID NO: 16 (construct tri-Secto),
ix. SEQ ID NO: 18 (construct tristab-Secto),
x. SEQ ID NO: 42 (construct S3F),
xi. SEQ ID NO: 44 (construct S2P3F),
xii. SEQ ID NO: 46 (construct S2PΔF),
xiii. SEQ ID NO: 48 (construct S2PΔF2A),
xiv. SEQ ID NO: 21 or 37 (construct N),
xv. SEQ ID NO: 51 (construct T4-S2P3F (tristab-Secto-3F)),
xvi. SEQ ID NO: 53 (construct S6P),
xvii. SEQ ID NO: 55 (construct S6P3F),
xviii. SEQ ID NO: 57 (construct S6PΔF),
xix. SEQ ID NO: 59 (construct SCCPP),
xx. SEQ ID NO: 61 (construct SCC6P),
xxi. SEQ ID NO: 63 (construct S_{MVopt}2P),
xxii. SEQ ID NO: 64 (construct S_{MVopt}ΔF), and
xxiii. SEQ ID NO: 66 (construct S_{MVopt}2PΔF).

22. A polypeptide comprising an amino acid sequence selected from the group consisting of:
i. SEQ ID NO: 3 (construct S);
ii. SEQ ID NO: 5 (construct stab-S);
iii. SEQ ID NO: 7 (construct Secto);
iv. SED ID NO: 9 (construct stab-Secto);
v. SEQ ID NO: 11 (construct S1),
vi. SEQ ID NO: 13 (construct S2),
vii. SEQ ID NO: 15 (construct stab-S2),
viii. SEQ ID NO: 17 (construct tri-Secto),
ix. SEQ ID NO: 19 (construct tristab-Secto),
x. SEQ ID NO: 43 (construct S3F),
xi. SEQ ID NO: 45 (construct S2P3F),
xii. SEQ ID NO: 47 (construct S2PΔF),
xiii. SEQ ID NO: 49 (construct S2PΔF2A),
xiv. SEQ ID NO: 22 (construct N),
xv. SEQ ID NO: 52 (construct T4-S2P3F (tristab-Secto-3F)),
xvi. SEQ ID NO: 54 (construct S6P),
xvii. SEQ ID NO: 56 (construct S6P3F),
xviii. SEQ ID NO: 58 (construct S6PΔF),
xix. SEQ ID NO: 60 (construct SCCPP),
xx. SEQ ID NO: 62 (construct SCC6P), and
xxi. SEQ ID NO: 65 (construct S_{MVopt}ΔF).

23. A recombinant protein expressed by the transfer vector according to claim 14 or 15, further comprising an amino acid tag for purification.

24. A recombinant protein expressed in vitro or in vivo by the transfer vector according to claim 14 or 15.

25. In vitro use of an antigen having the sequence of any one of SEQ ID NOs: 3, 5, 7, 9, 11, 13, 15, 17, 19, 22, 23, 24, 25, 26, 27, 43, 45, 47, 49, 52, 54, 56, 58, 60, 62 and 65 for the detection of the presence of antibodies against the antigen in a biological sample previously obtained from an individual suspected of being infected by SARS-CoV-2, wherein the polypeptide is contacted with the biological sample to determine the presence of antibodies against the antigen.

26. A method for treating or preventing an infection by SARS-CoV-2 in a human host, comprising administering the immunogenic composition or vaccine according to claim 18 to the host.

27. A method for inducing a protective immune response against SARS-CoV-2 in a host, comprising administering the immunogenic composition or vaccine according to claim 18 to the host.

28. The method according to claim 26 or 27, comprising a first administration of the immunogenic composition and a second administration of the immunogenic composition.

29. The method according to claim 28, wherein the second administration is performed from one month to two months after the first administration.

30. A nucleic acid construct comprising:
(1) a cDNA molecule encoding a full length antigenomic (+) RNA strand of an attenuated strain of measles virus (MV); and
(2) a first heterologous polynucleotide encoding a S protein or immunogenic fragment thereof of SARS-CoV-2 comprising an insertion, substitution, or deletion in the 11 amino acid residue sequence of the S protein aligned with positions 1263 to 1273 of the amino acid sequence of SEQ ID NO: 3, and wherein the insertion, substitution, or deletion increases cell surface expression of the S protein or immunogenic fragment thereof,
wherein the first heterologous polynucleotide is positioned in an additional transcription unit (ATU) located between the P gene and the M gene of the MV (ATU2) or in an ATU located 3′ of the H gene of the MV (ATU3).

31. The nucleic acid construct of claim 30, wherein the S protein or immunogenic fragment thereof comprises a substitution in the 11 amino acid residue sequence of the S protein aligned with positions 1263 to 1273 of the amino acid sequence of SEQ ID NO: 3.

32. The nucleic acid construct of claim 30, wherein the S protein or immunogenic fragment thereof comprises a deletion of all or part of the 11 amino acid residue sequence of the S protein aligned with positions 1263 to 1273 of the amino acid sequence of SEQ ID NO: 3.

33. The nucleic acid construct of any one of claims 30 to 32, wherein the encoded S protein or immunogenic fragment thereof further comprises one or more additional substitutions that maintain the expressed S protein in its prefusion conformation.

34. The nucleic acid construct of claim 33, wherein the encoded S protein or immunogenic fragment thereof further comprises the amino acid substitutions K986P and V987P at the amino acid positions corresponding to positions K986 and V987 of the amino acid sequence of SEQ ID NO: 3.

35. The nucleic acid construct of any one of claims 30 to 34, wherein the encoded S protein or immunogenic fragment thereof is a dual domain S protein.

36. The nucleic acid construct of any one of claims 30 to 35, wherein the first heterologous polynucleotide is positioned in ATU2.

37. The nucleic acid construct of any one of claims 30 to 36, wherein the first heterologous polynucleotide encodes:
(a) a prefusion-stabilized SF-2P-dER polypeptide of SEQ ID NO: 76, or a variant thereof having at least 90% identity with SEQ ID NO: 76, wherein the variant does not vary at positions 986 and 987; or
(b) a prefusion-stabilized SF-2P-2a polypeptide of SEQ ID NO: 82, or a variant thereof having at least 90% identity with SEQ ID NO: 82, wherein the variant does not vary at positions 986, 987, 1269, and 1271.

38. The nucleic acid construct of claim 37, wherein the first heterologous polynucleotide encodes:
(a) a prefusion-stabilized SF-2P-dER polypeptide of SEQ ID NO: 76; or
(b) a prefusion-stabilized SF-2P-2a polypeptide of SEQ ID NO: 82.

39. The nucleic acid construct of claim 38, wherein the first heterologous polynucleotide comprises SEQ ID NO: 75 which encodes the SF-2P-dER polypeptide, or SEQ ID NO: 81 which encodes the SF-2P-2a polypeptide.

40. The nucleic acid construct of claim 39, wherein the first heterologous polynucleotide comprises SEQ ID NO: 75 which encodes the SF-2P-dER polypeptide.

41. The nucleic acid construct of any one of claims 30 to 40, further comprising a second heterologous polynucleotide encoding at least one polypeptide of SARS-CoV-2 selected from the group consisting of: nucleocapsid (N) polypeptide or a variant thereof having at least 90% identity with the N polypeptide; matrix (M) polypeptide or a variant thereof having at least 90% identity with M polypeptide; E polypeptide or a variant thereof having at least 90% identity with E polypeptide; 8a polypeptide or a variant thereof having at least 90% identity with 8a polypeptide; 7a polypeptide or a variant thereof having at least 90% identity with 7a polypeptide; 3A polypeptide or a variant thereof having at least 90% identity with 3a polypeptide; immunogenic fragments thereof, the second heterologous polynucleotide being positioned within an additional transcription unit (ATU) at a location different from the ATU of the first heterologous polynucleotide.

42. The nucleic acid construct of any one of claims 30 to 40, further comprising a second heterologous polynucleotide encoding at least one polypeptide of SARS-CoV-2 selected from the group consisting of: nucleocapsid (N) polypeptide; matrix (M) polypeptide; E polypeptide; 8a polypeptide; 7a polypeptide; 3A polypeptide; and immunogenic fragments thereof, the second heterologous polynucleotide being positioned within an additional transcription unit (ATU) at a location different from the ATU of the first heterologous polynucleotide.

43. The nucleic acid construct of claim 42, wherein the second heterologous polynucleotide encodes N polypeptide and the second heterologous polynucleotide is positioned within an additional transcription unit (ATU) at a location different from the ATU of the first heterologous polynucleotide.

44. The nucleic acid construct of any one of claims 30 to 40, wherein the second heterologous polynucleotide encodes at least one of the N polypeptide of SEQ ID NO: 22, the M polypeptide of sequence SEQ ID NO: 24 or its endodomain, the E polypeptide of sequence SEQ ID NO: 23, the ORF8 polypeptide of SEQ ID NO: 25, the ORF7a polypeptide of SEQ ID NO: 27 and/or the ORF3a polypeptide of SEQ ID NO: 26, the second heterologous polynucleotide being positioned within an additional transcription unit (ATU) at a location different from the ATU of the first heterologous polynucleotide.

45. The nucleic acid construct of any one of claims 41 to 44, wherein the second heterologous protein is within an ATU that is upstream of the N gene of the MV (ATU1), between the P and M genes of the MV (ATU2), or between the H and L genes of the MV (ATU3).

46. The nucleic acid construct of any one of claims 30 to 45, further comprising from 5′ to 3′ the following polynucleotides coding for open reading frames:
(a) a polynucleotide encoding the N protein of the MV;
(b) a polynucleotide encoding the P protein of the MV;
(c) the first heterologous polynucleotide;
(d) a polynucleotide encoding the M protein of the MV;
(e) a polynucleotide encoding the F protein of the MV;
(f) a polynucleotide encoding the H protein of the MV;
(g) a polynucleotide encoding the L protein of the MV; and
wherein the polynucleotides are operatively linked within the nucleic acid construct, are under the control of MV leader and trailer sequences, are framed by a T7 promoter and a T7 terminator, and are framed by restriction sites suitable for cloning in a vector to provide a recombinant MV-CoV expression cassette.

47. The nucleic acid construct of any one of claims 30 to 45, further comprising:
(a) a GGG motif followed by a hammerhead ribozyme sequence at the 5′-end of the nucleic acid construct, adjacent to the first nucleotide of a nucleotide sequence encoding a full-length antigenomic (+)RNA strand of an attenuated MV strain; and
(b) a nucleotide sequence of the Hepatitis delta virus ribozyme (6) at the 3′-end of the nucleic acid construct, adjacent to a last nucleotide of the nucleotide sequence encoding the full length anti-genomic (+)RNA strand of the attenuated MV strain.

48. The nucleic acid construct of any one of claims 30 to 47, wherein the measles virus is an attenuated virus strain selected from the group consisting of the Schwarz strain, the Zagreb strain, the AIK-C strain, the Moraten strain, the Philips strain, the Beckenham 4A strain, the Beckenham 16 strain, the CAM-70 strain, the TD 97 strain, the Leningrad-16 strain, the Shanghai 191 strain, and the Belgrade strain.

49. The nucleic acid construct of claim 48, wherein the measles virus is the Schwarz strain.

50. A plasmid vector comprising the nucleic acid construct of any one of claims 30 to 49, wherein the plasmid vector is SEQ ID NO: 29 or SEQ ID NO: 38.

51. A recombinant measles virus comprising in its genome the nucleic acid construct of any one of claims 30 to 49.

52. An immunogenic composition comprising the recombinant measles virus of claim 51 and a pharmaceutically acceptable vehicle.

53. The recombinant measles virus of claim 51 or the immunogenic composition of claim 52 for use in inducing an immune response against SARS-CoV-2 virus in a subject.

54. A method for preventing or treating an infection by SARS-CoV-2 in a subject, comprising administering the immunogenic composition of claim 52 to the subject.

55. A method for inducing an immune response against SARS-CoV-2 virus in a subject, comprising administering the immunogenic composition according to claim 52 to the subject.

56. The method of claim 54 or 55, comprising a first administration of the immunogenic composition and a second administration of the immunogenic composition.

57. The method according to claim 56, wherein the second administration is performed at from one to two months after the first administration.

58. A process for rescuing recombinant measles virus of claim 51, comprising:
(a) co-transfecting helper cells stably expressing T7 RNA polymerase and measles virus N and P proteins with (i) the nucleic acid construct according to any one of claims 30 to 49 or with the plasmid vector comprising the nucleic acid construct according to claim 50, and with (ii) a vector encoding the MV L polymerase;
(b) maintaining the transfected helper cells in conditions suitable for the production of recombinant measles virus;
(c) infecting cells enabling propagation of the recombinant measles virus by co-cultivating them with the transfected helper cells of step (b); and
(d) harvesting recombinant measles virus.

59. A nucleic acid molecule comprising a polynucleotide of SEQ ID NO: 75 (construct SF-2P-dER) or SEQ ID NO: 81 (construct SF-2P-2a).

60. A polypeptide which has an amino acid sequence of SEQ ID NO: 76 (construct SF-2P-dER) or SEQ ID NO: 82 (construct SF-2P-2a).

61. In vitro use of an antigen of the polypeptide of claim 60 for the detection of the presence of antibodies against the antigen in a biological sample previously obtained from an individual suspected of being infected by SARS-CoV-2, wherein the polypeptide is contacted with the biological sample to determine the presence of antibodies against the antigen.

62. A method comprising contacting a biological sample with the polypeptide of claim 60 and detecting the formation of antibody-antigen complexes between antibodies present in the biological sample and the polypeptide.

63. The method of claim 62, wherein the biological sample is obtained from an individual suspected of being infected by SARS-CoV-2.
